United States Patent Application Publication US 2025/0051766 A1 - sequence listing, part 19

SEQ ID NO: 5065 - DNA, 58617616 bp, Homo sapiens (residues 36,907,392-39,078,414 of 58,617,616)
  source 1..58617616: mol_type = genomic DNA
ggtgctagtaatgttctatttatcgtcctagtagtggtttcaccattctcaatttcaccatactatgcaatcatagtcatgcagttttatgtgtgtatgttatacttcaattttgttttcaagtaagaaataatcaaatgtttgataaatgaaagaatgagcttttaaatccagaacaaactggtcaaagatgttaaatagctgaaagtagataaaatgaaaacaagcacagggaaagaaaaagacacacatgcacttacatctatttctcagggtgggaatgtctactgttatacaaatctaaacgtagcgtatcataggaaggaatgaaactaaaatgtgactagaataattatagcataattgtagccagggaggtacttgctatattggactagggaaaaagtatgagaaaaaaaaaaaaagtgggatagcttatatggaagaggcttcaggcctttaaagggagcttcctgataacatctcagaagtatatctctttatagccctgctcctgagccatcatctcttacttacctgaacacaggcctctagtcagctctctatcaaccatccagggctcttttccttgttccaataaggagatcacagctggcttagaattggaaagtcctgttcacaagaaaagacatgggacatggttatgctgtggggtccccagaaatcagatccagtcccttagtgatcaaaggagagatgccactacaagaaggaccggagaaagatggagaagatgaagcttcagccacagcccattggagctgcccacttccaactcttccattctattttaactcaaaccattccttagggaacagggagcagaaattcagctggttacatgaagcaaataattcacaatggagaaaggagacacttccaagggcacactctgaattttggggaatagttatccttacccactgaaaccaggttgctgaaattctccaacatcacttctttgtataaattcatctgatcagcgtccaggcattcccattcctcttgagagaagtctatggaaacatccctgaacatcaccggcccctgaaacaacaaacatgctttcacaatgaaaggagaaaagaaaaagatggcggtagaggtggcaagaaaggacagagtaagcaaaattaaagggggtgaatcctatcatatcagaagatatacgtcctgtgtacaaagggatatacaaatagactggacttttccagtgatatgaaatagcatgcattcagctcaattagtgagtttcttccccctccccgctttccctttatgccccaagagaggggaaaatgggaggggctttcaaacacaccttataatacatggagtaaaaattcagaatatcaggggaaaacaaaaatgaaagtttctaaaagcttccagaagaaaacacagatcacataagttttcagaaatcagaatggcaatagacttctcaatagcatcatttgaaataagaaaaaaccaagcaattcctttaatattataaaggaaaataaattctgacctagaattctatagccagtcagattactaagccactatgaagattaaatcaagacaattttaaatctgcagggaatgataaaagtacttccaatgtggcttttcttaggaagctactaggctacatgttccatcaaaactaggtagtaaattaggaaaaagaaaaggtactatattaagaaactgtaaaactaacatgaaaatggtgatgaaagtgccagtataattataaaaggcaaatcctagaacatcatccggcagcagactgagagaacagcatctaggaacagaagaagtgaggactataggaaagacatctccaaagaaaactaaggagctagtatgtttcatcatgtagaaaatattgacaggcaactgacagcaatgttagagaatttgaaaaaaatagtgacacatacataaaaccgggcaaaagaagaaacaaggcaatttcctctgagaaaaatacaaattgtattagaaagaatccagaatctggtgttttacttggctcacattgtctgcaaggtcctaatgtctgcaacaatgtctgcaaggtcctaatcacagggatagcaatgattgaaagaaaaattatgagccgagcatggtggctcatgcctgtaatcccagcactttgggaggccgaggcaggaggatcaccaggtcaggagttcgagaccagcctggccaacatgatgaaaccccgtgtctacttaaaatacaaaaattagctgggcgtggtggtgcacgcctgtaatcctagctactcgggaggctgaggtaggagaatcacttgaacctgggaggcggaggttgcagtgagccaagattgcgccactgcactccagcctgggcaacagagtgagactctgtctcaaaaaaaaaaaaaagaaagaaagaaaagaaaaattgtgatataattctattgcatggacaaaaaatgaagactgtggtatgggaaatctcaatccatagttacctgcctagaaatcactggaaaatatgtatcaaaaaatagcaatataggaatattaattagaaatataggaaaaatgctaagagaaacagcaaaaagagtagccacctaaggggagtaggattgggttagtgggacaatgccctgccatttttcatgtcttttaacatttcttgaaaaattttttttttttttgagacggagtttcgctcttgttgcccaggttggagtgcagtggcacaatctcggctcactgcaacctccacctcccgggttcaagcgattctcctccttcagcctcccgagtagctgggattacaggcgccggtcaccacacccagctaatttttgtatttttagtagagacagggtttcaccatgctggtcaggctggtctcaaactcctgacctcaagtgatccacctgcctcagcctcccaaagtgctgggatgacaggcgtgagccaccacgcctggcccatttcttgaatttttaaaatgcgaaatgggttaaacataaatttaaagtatcacttagacaacagcatactttaagtttcttggaaattacaattcttataagactgtcataattattccctattaacataaacaaattcaacttttatacccttatggtagcagaaatttccacaatataaatactactgaatgaatctttcatttcagacattttcttaggcaaaaatacttttaagaccttttccagatatgcaggcccttccccataccttgccctatgcatctcttccattttgctgttccttagttgtatcctttgtaataaaactataatcaggccgggtgcggtagctcatgcctgtaattccagcactttgggaagccaaggggggtggatcacctgaggtcaggagtttgtgaccagcctagccaacatggagaaaccccatctttactaaaaatacaaaaaatagccaggtgtcgtggcgcatgcctgtaatcccagctactcagaaggccaaggcaggagaattgcttgaacccgggaggcggaggttgcagtgagccgagattgtgccgttgcactccagcctggacaacagagtgaaacgccatctcaaaaccaacaaacaaagaaaccaacaaaaaagtaaaactatcatcataagtatagtgctttcctgagttctatatgttattctaatgaattattgaacctgaaggagagttacgggaacctctaaatttttggctggctaggcagaagtgcagtgccttagacttgtggctggtgtctgaagcaggtacagtcttgtgggactgagtcttttttttttttctttgagactgagtctactccatcacccaggctggagtgcagtggtgcgatctcagctccctgcaacctctgcctcccaggtttaagcaatgcttctgcctcagcctcctgagtagctgggaccacaggcacacaccaccacatccagctaatttttgtatttttagtagagatgtgggttcaccatgttgtccaggctgttctcaaactcctgacctcaagtgatcctcccatctcggcctcccaaagtcctgggattataggcatgaccagctgggactgagcctcttaagcaatggggtctatgttaactctgggtagtgtcagaattcagttaaactataggacactcagttagtgtcccaaaaattttgtttataaaaggacacacattcccaattgataggagaaatgagggtacttctccctcaccttaggacaagcaagggggcccctttagactccagggtccaaagtggaatgatgagatactttggaataatttttgctgtattctctggagcttagggggcacaaagattagtacctatttccctctttggactagatgtggacccaataaagggacaaagtgacctcaacaaaggaatggatcacagaatgcagaagtgtatgacagatgtcataagtagccatttcaagaagacatgctgtgcatatcccaggaaatgcaattagaggtttccagcaggggcttctctgagagactcttaatagtgtctcctaacaaaggagtgttgaacatccatcaaggcaaaagagatcaacaccaaaacaagtcaagaaagacttttcttttccttacctcctcttccctacccctgctctaatctcataggatccagagactgacttaggcaggagaaatagaagctcagggcgaggaaatcaagaagcttaattatgtcccttttcatactttgcaagcttgaagcaattctcagctcagagaagaggctttaaatgaaactcacatattattacagtgaactagaggttgtaattagtaaaatgagactagattttgactgaaaacaatcaaaggacatcaaagagtgataaaaattatagtctataccagttcttatccagggcaacaaaaaaattaacccacagagagggttgagagtagaaattatgaggaaaaagtttttcttttgcttgcttcatatggaatcctgcttatttcaaaatgctgatcacaagcagatttggtttttcagttacacagtcacatcatctataaagcgataatcttatgccctcttttgtaatttttaacctaattttttttcttatgtaagtgttttggttaatatctataaaacaatgttaaataacattggtaatgtggtatatccttgttttacttctaattttcaaatattttgatgtttcaaatatttcctgattaaacattagattaagttctgaaaacaaattttatttcttttaaaatttattgtcccccgggcacagtggctcatgcctgtaatcccagcactttgggaggccgagatgggcagatcacctgaggttgggagttcaagaccagcctgaccagcatggagaaacaccgtctctactaaaaatacaaaaattagccgggcgtagtggcgcatgcctgtaatcccagctactcgggaggctgaggcaggagaatcgcttgaacccaggaggtggaggttgtggtgagccgagatcatgccattgtgctccagcctgggaaacaagagtgaaactctgtcccaaaaaaaataaaaatttattgtctactacagtatactacatgtccctagttattcccgttaatactgggcaacaatcttctctatagaaatgagaagtgtaactagagactgatgcaagaggggaagcagatattctatttgggctttggcacaggagagggaagactcagtcctctttaaaagaaattcagatagaaaggccttacacaaaatacttagttagacttattcttatcctgattttctctgcatctgtaccaaacacatacaatttaaaaattgagagtaggcccactcagagttccaaatttacaccttgagaaaacattgtcactattctgagtcctctatcctagtatgtatcctctaattttcagataaaatgattacctggtgaatggataaccttacaatttagtgagttccccaagattagaagtgttgaaacacaaactgaataaagatatttttattattacttggaggaagaatccaaaaactctgtaattgcctgccatgcccactgccccctcctgagatgaggcaaggttcttttgtttgctttgatttcagctataagtatcaactctaaaaaccaaaaagagataagacacagaaaagaagaagaaattctaacatatgtttagttagaacctgagaaggaaagggggagagaatgatacgggggctttttgaaggtataatgactgaagattttcctgaactaataatagatatccatccataaattttaaaactctacaaatcccaagcagacaaataaaacacatttatatatcttacactaaaattacagaaagccaaaaacaaaacagtcagaggaagacaaggcagattaccatcaagggagacgagctaatcaagactgtatgatactggcacaggaatataaaaaatcagtggaagagaataaagagttcataaacatacccatgcacatatagacactaggtatatttgaagaccaatgagaacacaatagaccttccaatatatggtattgataaactgggtattaataaggaggggggaatctgactcttacctcataacatatacaaaaaccagttgcaactatataaaatatctaaacatgaaagtgaaacttatggctttaagcataaatataggagagtatctgcatgaccttgggacagggaaggatttatttaaaaagatacaaaaagcactaaccataaagaaaaaatattgataaactcagctttttaaaaattagaacttatcataaaatcatcttacaggaaatgatgaaatagtccaaatagtaggaaaacaatcaataaaggactgagatccagattacataaataactcatacgaatcaataagagctattccaagagaaaaatgagtaaagatttgaactgacatgtcacaaaagatgactaaaaaccaataaacatatggaatatgttcaattttattattaatcacggaaacccaaattcaaacctgtgggggtgggcgggtataagtacagatatatattcaaatgaggatttaaaagtctggcatgtctgatttgtatatcatagtttttgcaaacatcaaaaatgtatttcccaagaccatttgatgacatgggagaatatttctgacacttctttttgcaaaaatgtagaacatcaaatggtaaatgaaataaaatttggtttttgacaaataatgaaaatacattaaaatattaaccctagttatctgagtggctaaattttattttttcttggtaatgctgtgtttttgagatctctaaattaatcatccttttatttttaaatcagaataaatatttgagaagaaaattcagcaagcataagtggagcaaccatccttttctgtgatgggaaaattatagggacctataattaaatgacattcctttaagcaagaattttcagaagaaaaagaggaaaccccaacacaccttggatactgcttgtagaagttcatcatgcattctttcctcctcttctgggtgacacctggagaaaggtaaaattgggagagggaagagtaactgtgagacaccaggtttttcttggtacccagattagtcaagtaagagttcttccccagccccattacccaccacacatgaggaatggagatcagaggagaatggggcattctgtccaattccagtggctcaggggaaaggttgtgttcactgctgtccagggttggaatctgaccagacctcagagaggtttcctagagacagagttctggagtcacaatcgcatagttgacaggaccccatactcatacacagaatgccacatacatttagggacagtcacacttaaggcgacatgcacgtctcacctgcccacaaggagccacacacggcaacacagttacaatcacatacacaccataggaaacacacaattacagctgcacaatcgtaggcaccccacactgtcgcagagtcacaatcacacatcaccacgggaacacacagccacaacccccacagtgacaggtatcccatatccgcacataagccgcagtgttattatctcccagacaatttcacaacctcccctctttttttgggggggtggggtggggtggggacagagtcttgccctgtcgccaggctggagtgcagtggtgcgatctcggctcactgcaacctccgcctcccgggttcaagtgattctcctgcctcagcctgcgagtagctgggattacaggcgcgcgccaccatgcctagctaatttttgtatttttagtagagatggggtttcaccatgttggccaggatggtctcgatctcttgacctcgtgatcctcctgcctcggcctcccaaacacaacctccacctttcaggccgctccgcccgcaggggcccaaggcgccagctccccatcggtcttcggtatcctcacctaagccctttccagtcatcccggatgggaacttgcagacctgagccagttctcctggggaccaaaatatctcacctcccagatctaagggtcccgccaggagtgacgaaacgttcgaattcctgcgagaaaagtggcaggccaccaggccctctgggaaatgtagtccagagcgggacccacgccgattcctgtcagctcctcgcctgggcccacccgaaacggctgctccctcaactctcaacatccagccgagcctcggagttgcgggtcgccgtagcgctgcgcaatggagatgagcctcccggggaacccggcccaagcctcaccctcacacaggaaagcagatgtgttctggccggaagttgagtggggccgcggggcctgctgggaggtgttgtcctcggaaacgtcgctggcgcggagggatggttcggcgctttaggcgtctgtcacagacctatctgcgggtcgccttcacccagcatctcagaaactgcgcgcgggatgaacattcgggtgtttccggcaggtgacgctgccgagtccccgcagcagggggcgagcaagggactcgcggttgacgggacacggatcctctaaggcccagagtgtcccgagtagcggcagtggggagtgctcagggtacgctaatggtgagtggttgcagttgatgggacaaaaaactgtgatgggagttagtgtgggtgtgtggttgtgtgtgtgagtgtgacggcacgaataatctgatggggtgattgtgatatttggttgcgcgggattatgatgaaatgtgtgatatgtgtgtgattatgattaaggctgtagcgagtgtgaacgtggcgaagtgtgcgtgattgtaatatgtctagtagttcttgtcttgagctggcttttctgtagcatttggcacagttggtaacggcttgaaaaacacttatttgttttctactgatcctccctccttgttggccactcctctgtagtcttctttgctgtcttttttaccctagtagcccttggccctttgtaattttccactattccttggcgaacttttcaggttcattattatcttatgacttgctgcttttatgtatgttagttagctattgccatgataataattatgtctaaaaaccacccctgaactcaatgccatacaacagcaagtccttactctcctgttcacaggcttgcgcattgactgtgttcagctgatctaggtggggcttggctgagtggataggctgcgtgacgagttaagatctgcgccgcatgtgttctttcagggtctcaggccaaaaggacatttgttgccagggcatgctctgctcctgatgggtcaccagagcgcaagagagattgcctcaaccagagcaagtcacatggctaagcctaaaatcaattatgcccacagttggagagcaaagttacctcgcaaagagtatgaataataatctattagagggtgtgaggaattggactaaaattccagtctaccaccttaagaaacatacctctttatcctggtgaatgccttttagtccgggttctcttttgtctgataatattgcttttcaagttttattgtatttcttaagaatttcattttctaacccccttgtgtctttatgtttcagatctgtgtcttgtaaagagcatattgctgggcttacatccgtttatcttgtttgactgttattttaataggtgagtatagttcagtggcatttatcatgattgctcataaaaaatgttttattttctattacgccttaaacatttttgattgacatataatagttgcacatatatctttttttattgtgcaaattcaccttatccctttttctcccctaggttggtttctgctattatccttttttaatatgcatgcttaacaaaactcaaccttaagactttaaaatacttgaactccaaaatatccaccaatttctgtgttattcttgtctcatatattattttcttctagtttttgttgttgttgttgttttgttttgtttttttgagacggagtctcgctctgtcacccaggctggagtgcagtggcacggtctcggctcactgcaaactccgcctcccgagttcaagcgattctcctgcctcagcctcccgagtagctgggactacagacgcgccaccacgcccggctgattttttgtatttttagcagagacagggtttcaccatgttagccaccatggtagatctcctgacctcgtgatttgccgacctcagcctcccaaagtgctgggattacaggcgtaagccaccatgcccagcctattctcttctagttttaaatccccaaattagtagtagtagctcatttattctatatacagttcgtatccaggaggggttggtttcaagaccccccatggataccagaatccacagatgctcaagtccctacatccttctttatacattaaatcatctctagattatttgtaatacctaatataatgtaaatgctgtgtaaatcattgttacacgttattgtttagggaataatgagaaaaaaatctgtactgtacgtgttcagtacagacacaactgtagtaggcctaactgtattttttatctgaggctgattgaatctgaggatgcagaacctgtggataaggaggaccaactatgtatacacacatgtatatttaattgtggtaaaatacacaacatagaatttaccatctaaaccatatataagtgtacagttcagtggcatgaagtacattcacattgttatggtaccgtcaccaccatccagccagagaactcttcttcttgcaaaacagaaacccagtacctatcaaacaataactctgtacccccctttcccccggcctatggcatctaccattctactttctgtctctgaatttgactattctaaatacttcatataagcagaatcatatgttgtttgtgcttttgtgaccctgatttaacttagcataacgtcctcaagattcatccatgttagcatgtattggaatttcctccttttttaaggccgaatgataagtatgtcatatatggataaatattttgtttatcaatttattcatcattggacacttgggctgcttctaccttttggcaattgcaagtgacactgctacaaacatgggtatacaactatctgagtccctgctttcagttttttatatatacatgtggtaatgtctgtttttaatctttgattgtcatagtgttttcgataatgactgaaccattttatcagcatatttttgagcacctactatgaatatcaaaaacagacaaaaataagtccttgttttcatggagtttatgttgaggggggtgggtggacagtatatataactaaattatagtcatgtgccatatatgtatggactatatacatacatgacagtggtcctgtaagacagtggtccccagcctttttggcaccagggagtggttttgtggaagacaatttttccagggactgggggatgggagggttatggtttcaggatgaaactgttgtccctcaaatcatgaggcattagattcctataaggagcaagcaacctatatccctcgcatgcacagttcagaagagggttcacactcctgtaaggctgtaatgccaccactaatctgatagaaggtggagctcaggcggtaatgctcactcacctgctgctcacttcctgctgtgtggcctggttcctaaccaggaaccagtactgtaccagtaccggtacgtggcccaggggttgaggacccctgctgtaagattataatggagctgaaaaattcctgtcacctagtgactttctagccaatataacactgtagcacaataccattactcatgtgtttgcagtgatgctgctgtaaacaaacctactctgctgccagtcatataaaagtataacataaaattatgtacagtacataatacttggtaatgataataaatatgttactggttcatgtgcctactatactatactttttatcattactttggagcatatgcctatttatttaaaaaaagttaactgtaaaacagcctcaggtccttcaggaggtattccagaagaaggcattgttatcatagaatgtgatagctctgtgtgtgttattgtccctgaagatcttccagtggggccagatgtggaggtgaaagccagcaccaatgatcctggacactgtgtaggcctaggctaatgggtgtttgtgtcttaatttttaacaagaaagtttaaaaagttaaaaaatttttaagaagatagcttatagaataaggatataaagaaaaaatatttttgtacagctgtacaatgcattttaagctatgtgctactacaagagtcaaaaagttttaaaaaattgaaaagctggctggacacagtggctcacccctataatcccagcactttgggaggccgaggcgggtggattacaggaggtcaagagttagagaccaggctgaccaacatggtgaaaccccgtctctactaaaaatacaaaaattagccgggtgtggtggcagacacctgtaatcccagctacttgggaggctgaggcaggagaatcacttgaacccaggaggcttaggttgcagttagccaagatggtgccattactccagcctgggtgacagagtgagactccatctaaaaaaaaaaaaaaatgaaaagcttataaagtaacaaagttatagtaagctaaggctaattcaacaatttgaagaaataaaaattttataaatttagtgtagcctaagtgtacagtgtttataaagtctacagtagtgtacagtagtgtcctaggcctttgcgttcactcgccactcactcagagcaacttccagttctgcaagtttcattcatggtaagtgccctttaccagtgtaccattttttatcttttatattatatttttaccatttctctcctgtgtttaggtatgtttagatatacaaacacctacctttgtattgcagttgtctacagtattcagtacagtaacatgccatacaggttcgtagcctaggagcaataggctataccatatagcataggtgggtagtaggctataccatccacatttgtgtaagtacacttatatttgcacaatgatgaaattgcctaatgacacatttctcagagcatatctctgttgcaaagtgatgcgtgactgtatatattaatagtttgttagaaagtgatcactgtcggccaagcatggtggcttatgcctgtaatcccagcactttgagaggctgaggccagcagatcacctgaggtcaggagttcaagaacagcctgaccaacatggagaaatcccatctctactaaaaatacaaaattagccgggcgtggtggcgcatgcctgtaatcccagctactcaggaggctaagccaggagaatcacttaaacccaggaggcggaggttgcagtgaactgagattgtgccattgcactccagcctgggcaacaagagcgaaactccatccaaaaaaaaaaaagaaagaaagtgatcactgtcatgaaaaaaagtgagtgtgtgaggggtattaggaggatatctcaagcatagcacttctcaaaacttattataactgaatgttttctgttttatttgttctatcatacagggcaaaaattagtctattttgttacatatattttttttttaccctttacctaataaagactcatagcagctgctaaattaatatattttaatagtcatttcgtatattcatccaatattattgtgacatgagtataattgtcatttcagatgaagaatcttggaattctaaattgcaattctcccttaattcagttgccaagataatacagaaatggaatggaatagctggtctttgaatgaaactctcttttatgccaaatttggggttgctgcaaatctgggtgttttttgactcaggtttacatctgtcacctcatcgagcatacacctttagacacagaagatatctgaagaacagataggtaaacatcacttggtttatgcctctggtcagtgtgtccagagtgtatgaattacaaataaggaagattagtgtttgaggctatattatctattagtgtgtaacaaattacctcaaaaactagtggcttaaacaacaataaacattatctcacaatttctgtgggaagtgtcttcactgcgtatttgggcttgggtatctcatgaagttgcagtcaagttgtcagccgggctgcagtcatcagaaggctgggctggggctggagggttcacttccaagatagctggcttccaagttagtgttagctgtcaacaggaggcctctccctagggctggttgagtgttgtcatggtatggcagctggcttccctcaacatccatgatccaaatgtgcaagacagaagccctaatgtcttttataacctaaccttagaagtcacacaccatcatttctgcaatatcctattggttatgcaggtcaaaggtactcatggtgggagggatctacaaaggcatgaataccagaagacggtggtcactgggggccatcttggaagctggttatcacagggagccagtgagaaggcaccaggtaaattagatttatatcctaatccacaggtcctggttccacaaggataaaacacatctgcagtgcaaatagaagtctgaggaacaggtgtcttatcatggaaggagacctgacctgagacctgccttagaggctggagagtcctgaaagagagtggaccctggagttgctggagcttgtcttgacccttctgcccagagcaggcagggtctgaatgacatctcaatcttcagtgatcagcaatagctgtgtgacaatggagcgtttgagccacatgatggaaaggaaaggtgaggtggctcataggtggacagagcttaggagagaaaggctctacatttggggacagtgaaaagaaattcattactcctactgagaaaggtcacgtatgttaattgactaggcaggggagacatttgtttttaatcatattcatttgactatttgattttttaaaataaattttgaaatgcaatttttatttcttaagagtatgtttaagtatatctttaaatgctgtactataacataaacaaaagcttcctattccatccatcctggttccctgtccccattcctgaaaggcaaccactttgaacatttttgtctcaatattctggtattcacctccttttttctaaataacattcttacactgctaatgcttcatttctcagttttagatatttcctgttgatttttgataatgaagttaaggatttagctctctttcactacctaaccccttccgtttcatctccaccccaacacactcttctccttgcccttctttctaatatggtattattttttggaggttgaaggttgaccagatgtcagcatctgtaagcattttcttttgggctagtcagtttccccagcaagaagtcctagattttgcttgagaagtacaagccagaactcctgctttttgggagacgaaggaagtgagcatgttggacacctcatcttgcaatatgagaactttaattcttttctctctgcattgcttcaaccccacctttatctgcatctggtatgcctgaaattcagagcttgtctcattcagtttatctagagaaataatctttaatttttttctgttgccaatgtgagggaaatgtgactatgccatgttgggtgaaagaaaacatcaggtggttttaacatctttttatgacatcttacattcggttttatgtttttcagccctactcccaaactctagtccacagaagtaattagtagctccattcctgaacctttctagggtcttgtcatggcttccccaccctcctcccaccttcacttaagcttcagctttctctggttaagttagataccactcatttgtctgctctttagcttcccacattttgttgacagctcttatctgtggaaatcttctatattctttgtccttatgagttttagcctccttttttcctttattaacattatgattggtttgggagagagtggaaatattaataaatgcaggtattcaggcttttatttttaaccaaaaggccctgaattttttagggtaaaaaataaatcaagttttttaaaaatgtcattagaaacatgactgtattgcatcctatcttatcaatgttccacattacctatagccagtctctgatgaaggtttttttctaaattattttttttgagggggagacagagtctcgctctgtcgcccaggctggagtgcagtggtgtgatctcggctcactgcaacctgcactttccgggttcaagcgattctcctgcctcagcctcccaagtagctgggactacaggcgcacgccactacgcccagcgaatttttgtatttttagtagagacagggtttcgccatattggccaagctggtctcgaactcctgacctcgtgatccgcccgccttggcctcccaaagtgctgggattacaggcgtgacgaccgcgcctggccctaaattttttatggttaaaaaataacattttaggccaggcgcggcgtcacgcctgtaatcccagcactttgggaggccgaggcaaatggatcccttgaggtcaggagttcgaaaccagcctggccaacatggtgaaaccccttctctactaaaaatacaaaaaagttagccaggcatggtggtggatgcctataatcccagctacgtgggaggctgaggcaggagaatcgcttgaacctgggaggcagaggttgcagtaagcagagatcaggccactgcactccagcctggacggcagagtgagactccatctcaaaaaaaaaaagaaaaaaaaattttaaagatcatcccaatctttaaatttttggggtaactattattatgtacttaagataaacttcctgttagaaataaaacagcaagattctagggagataaaatattgccaatagattcattgggcactgcatacttagccctccataaatccccatcagaccccatatgattaaattagccatctgtgtccatttcagtgtctatagctagatggcagttaacatttcttattgcttcaaggatcattcatctgtagagggtcttctagccacctggtactgaagatttctatattcctttgtctgaaactttgaagcaaatctgtttcatttctcttccctcagcttggtgttctcaagagtctgccctttccgaggaagaagaggatacaaccaggcctcttgtacgtcttaagcatttatttgtttcctgcattattttgcagtgcagttacggtgggttcttgtaacctaccaatgtgttggaaaaaataaattgatgaaaataaaagtgagaaaaaatacagatagaaaatcagaacctggggaaatttgagatatggctatgcagaagcaggtacatacagaattattaaagttgagttcaaatttaaatatgatctggacagtcaaagcaaactgggacacttaagtttattccgtaagtccataagttgcaccatttatgaggaaaaacttacaattatttaagtaaaaggcttttaactggcaccttgttcaaaaagaaactctaaaatatagttggacttctgtatctgtagattctgcatccatagattgaaccaactgcaaatcaaaaatacttgaaaaaaaaatgggtggttgtatctgtactgaacatgtacagacttttttcttgtcgttttctaaacaacatagtgtaacaactatttacatagaaatcacattatattaggttttataagtaatctagggacgatttaaagtatacgggaggacgtacattggttacgtacaaatcctacaccattttatataagggacttgagcatcagtggattttggtatccgtggggggtcctggaaccaattctacatggtttcctagggacgactgtaattccttaattcttacaatttttagcttagcttttagaagttggtcttggccaaacttcaaaaattcaaattacctggaagagtaagtggaacacatatctttcaaatgatcctacgtatatattttcttcaattgagtttttaatccaagttgagctaaattatactaatattctatggcagaatcttatagttctgatatccatagcttttcacatcttttttatggtctcagaagatatagtcttcatcctcatcttacaaaattacgtattctctgctcttgattctttttgtttccacctctgaagtcactcacacacctatattttgaatgttttctgcttaactgcctctttttcttcagcttatgtctttcacatcatgaaatatacacacatacttcttttgaccatatgatcatatggctcatccagttacttctgttggcgcggtggccctagcaaacctctctggccctcgacaggcttgagtttaaatcttggctcagtgacttatgaagtgcatgactgtggacaagtttcttaatctttttgtgactcagttacatcatctgtaagtctataaatggggatgataatggtatttatcccacaggaatgttgggagggttaaatacatgtaacaagtaccccataaatgataggcattgttatttttttctcaaatatttttggtctgccattggttgaatccatggatattgaacccacagatatggagaaccaactgttacagctttattgagttcttactatgtgccagatgtattgtgctttacatagcttatttcatgtaattattatcagacgtctatgaagtacatattatttaaattttttaagataagggaaatgaagcacagaggttaagcttacataacatcgtgcatcaatgtgtcataaacccaggattcaaatccatacagtctgactctagggcccacactctacgatactgtacagatggaggctcattatgagtgaagaaatacaaaagccaattacccattcatattgtttgtctattttgtaataatagttttttctgtattcgaaattagaatattttaagaatgtctatttcagtattaggacttaggatttatgcagctaccttctcccaatctgtcatttttatgttatttattttttgttgtatagacattgaagtttggatagttacatttagtgtatgataaatatgtatacataatagaattcagtcaaaatatgcaactattaatatttagtagtcttttctcatgagttgccaatgttaatcttttctaagatatctttcctaattaatattagatcatagagataatctctgttcaaagcattgttttccatatttagtctttaatccaactggattataatattgtaattggtttgagataggaatttactgataattctattagtagaattatctttgcatgtagaagaccagttgttccaacaccgtttattaagtagatctttcctttgtgatgccacctttactgtatacatacatgatggtttctaggcttttactttttctgtaatctatttgtctacatttatatcagtactgtactttgtgtgtgtgtgttttacattggtttaattacaattactttatatgggcaatgatttcaccacttctttatgcacacacattattcttagtttttcaaaaatttttcagctactttgggacctctgggcttccatttgaattttagaattagtttatctagttctaggaagaaatcctattggggatttccattgaattgcacaactagttggagaagaattaagcaaaaaatacatatatataaaaaatatataaatatatatatatataaagatatatgtgtgtgtgtgtgtgtatatatatatatatatatatatatattatatatatatatatattttttttttttttttttttttttttttggtgatgaagtcttgctttgttgcccaggcttgagtgcagtgacacgatcttggctcactgcaacctccacctcccgggtttaagtgattctcatgcctcagcctcccaagcagctgggattacaggggtacaccaccatgcctggctaagtttttgcatttttagtagagatagggtttcgccatgttggccaggctgacctcaagtgattctgacctcaagtgatccacctgcctcagcctcccaaagtactaggattgcaggcatgagccattgcacctgtcccgaaagatattttctgtcacaattaaagatgtttccatttaagggaatctattaatataaattattatattcaagagaaaaacaatcagatctatagagctgaaaatttttttaactcagaacctgtgatttcaaaaggacctatttataaagtaaaagtaaaagaacattttcttatgatattttaagaaattattcacacgcatacaacacatatatatgtgcagataataagctacaagctagtaccatgtttacttgtaaaaattaggcactttcctactagtcaggaacacaaccagcttgccagtgctactactacgattttgtatgcctagacataagtaaggggagggaaatgaagtaaaaagcaggatggtgcattcaaaattatgatatctaagtgatacaattatgtttttaggcaacagaagagaaacacaagaatgattgaaatatggacacaaaattaatatacaaaaatcaataccatttttctctataaaccacaccatcaaaaatgaaatggaagaatgatgctcagactagaaaaaaacccgaaagaaaaaaataaaatgtatgtggtgtacatgggagaatgaaaccttcaaattattactgagatagaggatttgaacaaattttttaaatacccttttttggataagagccatcattattaaattaatataaattgtctttaacctacatagattgatcagaatctcaataacaattctaaattatttttcttagaattagacaagtttatttgagccgagtctagaatacatttgaaaaataaaaacatgcagaatggccaggaaaagtataaaagaatgtcatgtgccatgctctaagtttttaaaagaagaatatttgtttaatgcttacataactttagggaaaaaaaaattttataaaaagttgccagtcaacatatacacccagaactgacttgtagttatctttattccctcactgtaaactttgttattttaaacaattatattctattatgtatcttaaaagtgaagaaagcgaggcatggtggctcacacctgtaatcccagcattttaggaggccacagctggaggatcacttgaggccaggagtttgagaccagctggatcaatacagcaagacccagtctttacaaaaaattttaaaaaattagctgggtgtggccaggcgtggtggctcacgcctgtaatcccagcactttgggaggctgaggcgggtgaatcatgaggtcagaagatcgagagcattctggctgacatggtgaaaccccgtttctactaaaaatacaaaaaattagccgggtgtggtcgtacacacctgtagtcccagctacttgggaggctgaggcaggagaatcacttgtacccaggaggcagaggttgcagtgagccgagatcgcaccattgcactccagcctgggcgacagagcaagactccgtctcaaaaaaaaaaaaaaaaaaattagctaggtttggtggctcacatgtgtagtcccagctactcaggaggctgaggcaggaggattgcttgagctcagcagtgagtcttcagtgagctatgattgtggcactgctccagcttaggtgacagagcgagacccagtttcaaagaaaaaaaaaagtgaaggagaggaaggtgctgtggtaccagcaagaacattggaaatattattgcctcttgccaggggcagaagcgtgttcatgtttttttttttttttggttctgtttgacaggagaaggaataaaacttaatgacatgaactgtgaatttatgttttttaaggttcgaacccctatgtttcttgctattaatactgaatttcttaacatttgtatgtgaagagaatcaacatcttgggaaaatagaccctattgtaaagactgactcatcattttatacagtcaaaaattaaagcatattttacttcttggtattttgttacttatggcttttgtcagggatgcaatttcttttttttttttttgagacagagtctcgctctgtcgcccaggctggagtgcaatggcacaatcttggctgactgcaagctccgcctcccaggttcacgccattctcctgcctcagcctcccgagtcgctgggactacagacgctcgccaccacacccggctaattttttgtatctttagtagagatggggtttcaccatgttagccaggatggtctcgatctcctgacctcgtgatccgcccgcctcggcctcccaaagtgctgggattacaagcatgagccaccgcgcctggccaggggtgcaatctttttatatgagatttatgctaagttactagagttggtgggaaaatgtttttgtgctgatttgttagcactaatttaaaaaatgttttctctttttgtagttttcccctatctttgttgtggtgtatattccagagggattatctatttctgaaacattcatcagttgattattgtgtcaagctctgttctgagtcacatttactgtgttatttagtcttcacatcaaccctttaaggagaattccactttatagatgaggaaactgagactcaagtttggctatttgtcaaggtaacacaattagtaaattttgaagccagagtttgaacccatgacattggataccacagcctattaactggtaaaaaatatctaaacccagctccgttttgaaagtttagtatttcagcattttttttcagtcagaaatgtgtcagtcacatgtctgttcagcctttctgctgcttttgtgaatagaaaacaggcgttcattcttatccttggggtctgcaggttaactatgtgggcatctctgctttgggctgcagatcagctggccttggcttaggctccacagtgggcttgtgtctgctctgcatatattcattctgagtttcagctgaaatggcacagcttcctgggccaaggtcttcatttgctgtctcactggagcacatgagccaaggtaaagggtgtaagcaaatttcaggcctttgctcacatcatgtttactgacattccttttgccccaacaaagggctcagacaaggcccacattagtagatgggacattagtacaggcaggaagtgaagactcgctgaataatcaatttatcacagtaatattttctaatggaattattttttgttgagtttgtttttgagaccaggacttgctgtgttgcccaggctggagtacagtggcatgaacttggctcaggtgatcctcccgcctcagcctcccgagtagctagatgataggcatgtgccatcatgcctggctaatttttttattttttatttttcgtagagatggagtctcactatgttaccaaggctgttctcgaactcctggcctcaagcagtcctcctgcctcagcctcccaaagtgctacgattataggtgtgagctactattcccagcttcactgagattttttaaactttaaacatattgaaatatagtcttataacttaaaaaaactttattaacatataagtcacatactataaaattagcccatttaaagtatacaagtgagtggtttttagtgtattcacagagttgtgcaaccatcaccataatcaatgttagaacattttcatcaccctgaaaagaaaccctttacctgttagctttcacttcctgttttcccttaaggctctgatgtaggcaagaataaatgatttctagctctatggatttgcctattttggacatttaatgtaaattgagtcatatgataaactgttatcctttgtgttgcctttcgcttagcattatgttttcaagtttcatgcattttgtagcttgtacgagtactttttatttctgaataatattctcttgtagggatataccacattttctttattcattgattaatggaaatttgattcatttccccttttaggctattatgaataatgctgataagaacattgatgtacaagtttttatgtggtcatatgttttcacttctctgaagtttgtacatagaaatgaaattgctagatcatatggcaactctatgcttaaccttttaaagaattgccccactgttagccgagtgcaatggctcatgcctgtaatcccacactttgggaggctgagatgggcagatcacctgaagtcaggagttcaagacccacctgaccaacatggtgaaaccctgtctgtactaaaaataaaaaacaagtagccgtgcctggtggcacatgcctgtaatcctagctacttgggaagctgaggcaggagaatcacttgaacctggtaggcagaggttgcagtgacccaagaccacacaccattgcactccagcctgggcaacaagagcgaaactccgtccccagaaaaaaaaaacagaattgccctactgttttccatagcagttgtgctagtttacattcccaccagctgtgtatgaggattccagtttctccatcagcacttgttcttatctgtcctttggttatagctgtcctagtgggtgtgaagtaaagctcatgagattttgatttacacgtactgtataacttgtgatgttgaacaccatttcctatgtttgttggccatttttattaatatatcttctttgaagaattgtctattcagagcctttgcccacttctaattggtttgtcttttgattattgaacttttaagaggtctgtacatattcaagtgtcatcagataaatgatttggaaatattttatcctatcctctgggttgtcttttcactttcttgatgatgtccttagaagcacaaaaatttttagttgttctgatgtccatttttatttaattttcttttgttgcttgtgcttttggtgtcatatctaataaaccattgcctaattcaattgaaggtcataatttacaactatgtattctgagaccttttttttttttttttaagctcttacagctagatctttgatccattttgagttaacctttgtatacggcatgatccaccttcattcccttgcatgcagacagtccagttgttgtcccagcatcatttgttgaaaagactattctcttccctggtgaagttttttatcaccatttattatgatgtgggggttttgtagttgccctatatcatgttgaggaagttcccttcttttgcttatttgctaatttgttggatgttgggttttttggttgttgttgtttgtttgttttcaatgataaaagggtgttggattttgttgactactttttctgcatttacggagatgatcttatggtttttgacctttattatattggtatgatgtattacattaattatcagatgttaaattaatattgcattctgctggggtaaatcctacttggttatggtccataatactttttatatgttgttggattaggtttgttagcattgaggatttttacctctctattaataagagagagtgggctctagtgtttttttggggggtggtgcgtgtgtgtgtgtgtatgttctttgtcaggttttagtattagggtaatacttgcctcataaaagatgtgtcccctccttttattcatcctctttgttttggaagagtttgtaaataagttagtattaatttttttgttgtttgttaaaattcaccagtgaagccatctaggcctgagtttttcttttgggtaggtttttttttttgttttgtttttttgttttttttttttttttttagtaattcagtctcttgttacaagtcttttcatcttttctttttgttgcagtttaatcagtttgtgtctttctagaaattcattcatttcatctactctagtttgttggcatatatttattcataatatttctttgtattcctgtttatttctgtaagattagtagtaatgtttcttctttcattcctgatttttgtattttgagtcttcttgtcagtgatatttgtccattttgtcaatttttagttttattgattctctctaatgtttttctagtctaaatttctttgatttccattctgatgtttgcttatttccttttagttactttggatttagtttgatcatcttcttctagtatcttttttttttttttttttaattgaggcagagtctcactctgtcacccaggctgaagtgcagtggcatgatcatggctcagtgcagccttgatctcccaggctcaggtgatcctgccacttcagcccggtcccctaagctcccagtagccgagactactggcatacaccaccacgccctactaagtttttgtattttttgtagagatggggttttaccatgttgctcaggctggtcttgaactcctgggctcaagcaatccgcctgcctcggccttccagagtgccagattatgggcacgcccagccctcttctagtattttaaggtagaaagttagtttattgatttgaaatctttcttcttttttaataaagtgtgtacagctataggtttccctctaaaacttgctttaatggcattccataagttttggtatgttgcaccctcattttcttttacctcaaagtattttgtaatttccattgtgattttgttgatccattggttatttcagaatattgtttaatttttacatatttttgaatttcacaaatttctttctgttagtgatttctaatttttgcccattgtgatcaaggaacatactttacacaattctcttaaaatttattgaggctttttttttttttaagagacaggtctggctgtgtttccctggctgaaattcagtagctgttcacaaacataattatagttcactatagccttaacctcctgggctcaagtgatcctcttgcctcagcctcctgtgtagctgggcctattgaggcttcttttatagactaacatattttctatcttggagagtgctctatacacttgagaagaatgtatattctgttgagtggtgtgttctataggtgtctgttagatctggttggtatatggtgtttgagtcttctattttcttgcttataatctgcctagttgtatccattattaaaagtggtgtttgggctgggttcgggggctcacgtctgtaatcccagcactttgggaggctgaggcgggtggatcacgaggtcaggagttaaagaccagcctggccaagatggtgaaaccccatctctactaaaaatacaaaaattagccgggtgcggtggcaggcgcctgtaatcccagctactcaggaggctgaggcaggagaattgcttgaacttgggcggcagaggttgcagtgagccgagatcgtgccactgtactccagcctaggcgacagactgagactctgtatcaaaaaaaaaaaaaaaaaagtagtgtttggagtctccaaaaattattgttaaattgccagtttctgccttcaattctgtatttttgctttaggtattttaagactgttagatgcatatataattgttatatctttctgccagattgacccttttatcattataaaatgtcctttagtaacagttttgttttaaattctattttgtctgatattagtatatccactctagctttctatggttgttcgcatgctgtgttttttccatcactttattttcaagctatttgtatatttgaacctaaaatgtatttcctgtagacagcatgtagttgaattctgtttttctatccaatctgacaatctgtccttttttttggcctgtttaatccattcagagttaatggtaacactaaaattattgggctatgtctgccattttcctttttgttttccatatgtctcatgtcattttttgtttctcctttactgctttcttttcactaagcaaatattttccagtataaaattataatttctttaatgatttttcactatattttcttagtggttgctctaggacttggatactatgtatcttatcagaacctacttcagatttatactaagttccattaagatatggaaatgttggtcttatgtagctctattccctcttcccttgttttgtactattattgttatatatgttacagactcaacccattattataattactactgcatataatgttgcatcacttaaagaagctgagaaaagagagcaaatatgtattatgtttattatattaaccttatttaccatttgtttgtgttgattcaagttctagtaaatcttgtgtcattgcttactctattccaaatttgctctgaagattctctctttatctctggttttcaacatttttgctatggtatatctgactgtgggcctcttacatttattttacctggagttcattgagcttcttgaatgtataatgttttttgtcagatttgggaaatgtccaaccattatttctttgaatgttttttctgcacctttctctcttcttcttctagtactcctacctctgacccctgagtaccagctaaacaagttcttgtatgttgtgatcacaatgcctaattttgatgacttcaaattaattagcattatgtttttacaggaaacagtgacatttaaggatgtggctgttgaccttacccaggaggagtgggagcaaatgaaacctgctcaaagaaacttgtatcgagatgtgatgctggagaactacagcaacctagtcacagtgggtaaggtggcttggtagccttgcaatttaacagagaattcttttccatttctgaaatgtgtgaagactgtaacttgccagatgaatctagcctttcctttctccatgtgactatatgtgctccactcttcagtgttaaaggctgattactttgtgtcattgtgtaagttcattcatcctcatcttttataagccctcaagcttggacttagcctaagatctgaatggttgtctccagcattgacatccacatcctttgctatttcttgtaataggctgtcaagtcaccaaaccggatgtgatattcaagttggagcaagaagaggagccctgggtgatggaggaagaaatgtttgggaggcactgtccaggtgaataagtgaaaagcagctctgaatgagaaagccacatgagagttgttcagtgaagggttgatatcatttcacaatttccaagattttcttaaaggccttattcttctagagtgacaaatgggatggagtgctttagattactgtgacatttctaggtattattcttcctattttgcagatattttcctcttttaaattgtagagggccagtagccctatccaatttcataataccaaccttccctaattcattcacagcttcactttcaggattattgttcctctctctatgatcctcgggcactctctttcctttatgtttatggtttcattttcttatgcattcagtatttcatggttgtgtagtaattttaaaacatgtttcacacttaggtttcttttcatttctttccttctttcttttttaaaaagccttagatttgtgtttggttaacaatagtttcacttcccattgtgcttcacaaccctcacaatcccatggcttagaaatgtaaaagtttctggcttagaaatcccatggcatctcctttctgcttattcctgccttccattcctttaatttttttgaaactacatgaggtccatccttggttgaaaagatataaccaatgtaaccaatattatacctataataccaatattataccttttgtgcaaaagtaaatcttcctcttatcctggacatggtcccttcctttccacagttgcatacacttcttttttggagttatcctggctatttttgattatttattttaccatatgaattttagactaaactgtctatttccagagaaaaacctgttggaatttttattgggattgtgctaaatatataaattaactttcagaaatttaacatccttttaatgccaatgttttctgtctaagaacacacactgtctttgttcagattttcatatctacttctgtgtcctttagaaatggagctttccaagttttcccattgttgcttttatacatttcactataataatgggtaagaaagctataaaaccatccttatttacagataatgagattgtatccctagaaaacacaagcaaaccaattgagaaagtacaacaaatagtaacagaactcagtgaggtggtaggatatcaaattaacaaagaaaaatcaatagctttcatatatacttcaacaaccaagtagaagatactaaggaaagaaaactacatttatagtagtaagaacaaagatgaaatactcttctgggcatggatatataacagtataccaaacaaaatcctgtctttatgagcttataatttaatggaaactagagtccctgaggttttgcatatgggaaaatatctttttaacctttacatttggttgatagttggctgtgtgtaaaattcttgaaccatactttcttttccaaagagttttacagacagttacctgagggatttagacaattctctgttgtttcctagattcaaatgttgcttggagaagtctgaagcctgattatttcccctcataggtgacttattttccaggatgcctataggtttctttttctttaaagcttaagtggctttatgaggctatgccttggaattgatcaatcagtatcagtttttcctttcagcttgtggattcatgatttttgttccttgaaatgtcgtcatatagatttcatgctcgtttcttttgtggttatcattgtcatctttcgatgaaggtatttcctgctgtagccactgtttacagaaggatagtgttgaagactgtccagaaaaatactctgagttggtaagaagtctctatacctcacactgacctcctttatcatacaaggttttgtgttgagagttggtttaccctttcattctcccaagttaaagagagattattatttgcatacttcctctagaactcagtgtctcttccatcttcctatgctaacaaactgcttatataagaatactggctgtttgcatctctttgttcagccctgcctttgtaccatttgtcagggccagatgaagtccattctgtacctgccacaatttcaagacatctggcaaaaaaatgactcattcattctgcccacaagggggtgcctctgttttagagaactctgttccctgtactttttgttggagataagaaacaggaactgctatctctgggtttcttccctgcctaatccagtctattttctgttctttcctcctattctggggatggagtttagctatctttaaggttcattgaagatgtattttctttctttttttttttttttttttttttttgagacggagtctcactctgtcatccaggctggagtgcagtggtgcagtctcagctcactgcaacctccgcctcctgggtttaagcgattcttctgcctcagcctcccaagtagctgggactacaggcacgcgtgaccatgcctggctaatttttgtatcttttagtagagacggggtttcaccatgttggccaggctggtctcgaattcctgacctcgtgatccgcccacctcggcctcccaaagtgctgggattacaggcaagagccactgcatctggccagaagatatattttctttttctgtttcttcttcatgtttgcagagtgaagaggagacagagatgtttaattctaccatattgaaacaggaagtcctctatgctgtatttgatccatttcacccttcttggaaatgtctttcttctttgtgcttctctaaaggattcaaattcttccttggttctggtttattgtttatttcttcttcccttgtgaaatatcttttacatgacttctttctcatctctcactggacatcacccaaagtagttctgaattacaatagacttctttttcctcagagtaccttcatgctatatctgtgttcatgctattaaataggtatttaactctagaaatgacagcattggaatatgtatctttaatgcctccagaattttgaaactcttcatatctctgccattaattatgagtgctcttacctaagttctagcagttatttaactttaatatcattttctaataaatggtcctcaatatttccagcctacattggtcttgcccatctctcaactaacattctattacacgtctaccagagtggttggaatctgaaaacatatactatcttctacatgttttcatattttgatgtctaacacttgtttattagtccacctggagaaagaaaacttttattcttcctataaatgagtcatgattgatgtagagctatatttgggaagatttttcttatttttggttgttttaaaatatttacctacagatttcaaaataaacgtggaagaaatcaggctagagttagaaagacagggcatagtcacatgagatagtgttgaatgttaaattgcatgtgaagtgtctatttagtaaatgagtaaaccagacaacacctagaaagttttaagagaagggctgtagaaggagtaacaagattgaggctttctttttctttttgataagagcttggcattgaagccattttcctgtaagatctatagcttatttagacttattaaaaattagaaaacataacaaaatgtttggaaagtaaaattagcgtgtctgtttggggggtaaaattagaaacatggcctgattagaggagagaagattgtaagagattagtgaaatcaaggatgagttttccattgtagagtcagaaagttctgaattttgctagcattcatgttctcttttgctgtcttttatttttaaaattttgttgtcaatttagtttattttttcccctctttaatcactgaagctatagttttgccctgtgcatggtggcagcaaggttacaatggtcaattataagcaggggtttataagataaacagaatatgaaggttaaaacacatctagttatctgaattttaagttacccacagctgatggaactccaggggcgtggaaaaccattgtagaactaatgatgtaggaatgttatcattttgggtgatggtatgaaagaaaaaagtcaaaacacaatggaatttgatataaaggcagtttcagtgtggagaaataaacataggataagatgataggacctgctgttaacacactgtggtgaatcaaagatggcttgcctcctgatcagctttatactttttattcaataaaattagaccttcctatttctaatatgccttgttctttaagcacatataaaaatgaatcacaattagatggaaagttggagctctctccatatttattaccaattttggatcgtatttagtttggacagactaatcttcaagtatgtttagatagaaataaaggaatttgaactttatgaaaattaatttgcctgtggtatgcagactgcacaaaagatagacttgtcaggatcatgacagttaatctaggcaaaagtaatgagaacttgggttatcatttgtttctcttaacctaatgtagctgttattatttctcatgccatttctttcccttttaatatgcatttttagttttttcaaagtataccttatacattacttgttttagagagccagtagaaatgtcagattatagcagtgctgtgctctgacctcacatttcacctcctttagtcaattatttttgactttttttaactatctcttttgttgtcgacctacgtattttgaaacaaatgtttatactgctctgtaaatttttttttttttttttgagacagagtcttgctgttgttgcccaggctggagtgcaatggcgtgatctttgctcactgcagctctgcctcctgggttcaagtgattctcctgcctcagcctgccaagtaactgggatcacaggcatacaccaccacgcccggctaattttttgtatttagtagagatggggtttcaccatgttagtcaggctagtctcgaactcctgactcacctcggtctcccaaagtgctgggattacaggcgtgcaccaccgcacccagtctgtaaatgtttctgtagtcattttcaaacataagaatagagagataaaggagctggtcgcggcagctcacgcctgtaatcctagcactttgggaggccaaggtgggcagattatgaggtcaggagatcgagaccatcctggctaacatggtgaaaccccatctctattaaaagtacaaaaaactagccaggcgtggtggcgggtgcctgtagtcccagctactcgggaggctgagacaggagaatggcgtgaacccaggaggcagagcttgcagtgagccgagatcacgccactgcactccagcctgggtgacaggaccagactccgtctcaaaaaaaaaaaaaaaaaaagaagaatagagagataatataaggaatcctcatgtattcatcactcagcttcaacagttaccgacattttcttagatttgtttactctgtttctctcttacccccactccagttttgttttgtttttttgctgaactactttaccttttcttttaaatactaccatatgtattgccaagagatttgtttaatcctgcaatatttctaacacacctaacaacattagtaataatttcttactatcatcttctacttagtctctgttatatatttcattgtgtcaagaatgttgtttatggttggtttatttgaatcaggatccaaataaaatctgcacattcttagttcacagactatacaaaagcaggctgtgggtatagtttgccaacccctgctctagatgtaccttattctggatttgccatttgacctccttgtggtggtgtttgacatgcttctttatcccatttttcctataatctggctttattcaatgcagattcaaatctttggcaagtatacctcataggtgatgctgtgtacatcctattgcatcttatgtcagtttgtcccacttacagacataattgagattgatcagtagattcatgtattgtcaggccaaatcctcctatttcagtgatctctgtcaacctttcacttaagggttttagcacctattgaccatcatagcctagatccattattttattgagcgtctttcacttttattagctgaaattctcccaaagagaaaaactctctcattaactatttgattgcactgaaatacagtttctcaggccaggaaaaagaaatactctttctcttcaaaagcttttagaataatgattggtgtcctagaggtttccaaaatttgtcaagttaaatcattataaatttatgtaatttgagcatcagaatatattataggcatataaatatttttcatatattattattattataatattgaagacagagtcttgctctgtcgcccaggctggagagcagtggtgtgatcttagctcactgcaacatccgcctcccgggttcaagcgagtctcgtgcctccacctcccgagtactgggattaaaggtgtgcgccaccacacctgtaatttttgtatttttaagtagagattgggtttcgccatgttggccaggctggtctcgaactcttggcctcaagtgatcagcccgctttggcctcacaaagtgctgggattacagtcatgagccaccacaccaggcccatatattaatactcaaattgtctcatcttgagcaagagggatctttagttaatcttgtaagtttcccgctccagacatggaaatagccatttctttaaaaacttttgcctcttttagcaggaaatgatattgtggagactgcagtctgaggattatggttgctctttaatactgagttattggttctatagcttttaagtggacagagctaggaaaaatgcatcttttaaaaagaaaaaaataggccagtcacggtggctcatgactgtaatcccagcacttggggaggttgaagcaggcgaatcacctgaggttgggagtttgagaccagcctgaccaacatggagaaaccccgtctctactaaaaatacaaaattagttgggcgtggtggtgcatgcctgtaattccagctactcgggaggctgaggcaggagaattgcttgaacctgggaggtggaggttttggtgagccgagatcatgccattgcactccagcctggacaacaagagcaaaactccatctcaaaaaaaaaacaaaaaagaaaaagaaaaatatatatgaattttagatacatccaattaaaattaaaaagtatagtgcccttttaccttttatgctgaaaatcttggctcctcattacatgtttatttccttaattcatatatatttctcacccttgacactattgacattttgggccagataattctttgctctgggggactgccttgtgtgttgggggacgtttagcagcatgcctgcttctactcactggataacagtagcgccatccctctttctccccatcatcttcccagttgtggaaaccaaaaatgtctgtagaccttccagacattgcccagtgacccttaaggagtaacactgattaatctatcttctttctttatatattaatttcaaattaacagtaatgctaatattactaataataaaaagacaactaaacgtaatttaagatgtcttttgagttttcttccttagaatatattctaatagggatatatagtcaaactactatgtttaaggttacttgaagtaattttctatgtgattatgaccctcatttgataagtaggcttgtttccaatttttttctatttttagggattgctttggcttttttcttttttgatttaatttttattttttcatatgtaaaatatgtacatgattttattgtcagaactctaaagttacagtcagagaagtcatggtttcagtacatgtaagtgaaaaaaactcagcgtagagaacattgtttagaatatactctcttttatgtgcaaatggatgggaagagagacagagagagaagtgtgtgtgtgtgtgtgtgtgtgtgtgtgtgtgtgtgtgtgtataaaatatatattaaaaatacaattggccctcggacaacatgggtttaaactgcacgagtccacttacatgctgattttcttacacctctgccacccaagacagcaagaccgacctcctcctcagcctactcagtgtgaagataatgaggatgaagatgtttaggattatccacttccacttaatgaatagtaaatgtattttccttatgattattgtaataacattttattttctctaagttattttattgtaaaaatgcagcatataatacatatacaaaatatgtgttaatcaactatgttttcaataaggcttctggtcaacagtaggctattactggttaagttttgggagagtcaaaagttagaaacatttgcaattatgtggaggattagcacctcatccccatgttgttcaagggccaactgtacatatgatatatgcgtgtatatgtactatatataaggaaatgtgtgattatatgtgtgtgtgtgtgtgtgtgtgtgtatgtatgtgtgtgtgtttttttaaatagtggaagaataatccaagaactggctgggcgtggtgtctcatacctgtaatcccagcactttggaaggctggggcgggcggatcatgaggtcagaagataaagaccatcctggccaacatggtgaaaccctgtttcaactaaaaaaacgcaaaaaattagccgggcgtggtggtgtgcgcctgtagttccagctattggggaggctgaggcaggggaatcgcttgaacccgggaggcggaggttgcagtgagccgagattgcgccactgcactccagcctggcgacagagtgagactctgtctcaaaataataataatgataacaataataataatccaagaactaataaaaatggttatctatagggcaaagcaggaattggtgtttcagggacagggtggaatctggacttccgctgctgtttggtaatttgtcagtttttatcaacttgatataaatagaagatgaggtttagtagcattaccacaatcacttctcctttccttttcttctggaatatagatacatcacaatttttagctaattcaatttcaccacttactttgttatgattgttgacatattgtttactatgaggcaagaaatgactcttaattaatatacttatataactttttgtcactcctagaattactacttgccttatttttctattttctatgtattattaatttaaatgataccctcaaaattctttgtttaaataaggaatccatcgttgttattagtttacctcattttgatgcatgaagggataaaagggaaattctaaacatcttccaaaattctaaattttaaagaggataaaagaaattttttagtttttttttttgtttccttttttttttttttttttttgagatggagtttcgctcttgttgcccaggctggagtgcaaagttgcaatctcggctcaccacaacctccgcctcccaggttcacgcgattctcctgcctcagcctcccaagtagctgggattataggcatgctccaccacacccaactaattttgtatttttagtagagatggggtttctccatgttagtcaggctgaactcccaacctctggtgatccgcctaccttggcctcccaaagtgctgggattacaggcttgagccactgcaccctgcctgtgttttttttaactagtggactatactgtagaatggttggatcagaacctagaagattttttgtttgtttgtttgtttgtttgtttgagactgagtctcactctgttgcccaggctggagtgcagcggcacgatctcggctcactgcaacctctgcctcccaggttcaagcaattctcctgcctcagcctcctgtctagctgggattacaggcacgtaccaccacgcccagctaatttttgtatttttagtagagacggggtttcatcatgttggtcaggctggtcttgaactcccgacctcgtgatccacctgcctcggcctcccaaagtgcggggattacaggtgtaagccaccatgccctggctgaacctggaagttttgtgtggggccccaaatgccagcatctgttgttccttttaatctttttatctcctatgtgtaggtacatgccagcattcatgaggctaaataacagaaagggattgttgatctcattcatgttagagtgtatggtgaatctaaatcacatgggaactctacatgcagttatgtctaggaaatgtagttttaactgcctcagcctttacgggatggaaaagcatggtgggagactggaatacatgttacttaagcagatccataactcttgccttggtgtgtaactgctccctactcagactttaatcctcttctttttagtcccactcttatcctacccactccacttttttttgagatgaggtcttgctatgtttcccagactagtctcaaattcctgggctttagcaacccttccaagtagctgggaatataggtacagcccactgcatctggttttttaaattaataaacttcatcttttaggctggttttaggttcacaacaaaactgagtggtgtacagagctcatgaaaaagtaccaagtatatggatacccactgcccaggcacacacagccttccccactgtcaacatcttgcaccacagtggtatatttgttaccatcaatgaaccttcattactgttattattatacacattattattacacaaagtccataatttacattagggtcactcctggtgttgtacattctatgggttttggtaaatgtataatgactcagatccattatagtatcttacagaatactttcactgtcctaaaactcctctctcttcctcctgtttattccttcctctcccataagctctggcaaccactgatacctttactagtcatcattttgccttttccagtttggaatcatatagtaggtggccttttccaatgggtttcttttacttagcaacatgcatttaaggttcctccatgtcttttcataacttgatagcacatctgtttttatcattgatgaatatttcattgtctagatgtagcacagtttatccgttcacctagtaaagggcatcttccaagtgttggcaattaggaataaagctgctgtaaatatccatgtgcagatttttgtatggacatatgttttcaactcattggggtaaataccaagcatgattgctgaataatatggtaatagtatggctaattttgtaagaaactgccagactgtcttccaaagtggctgtaccattttgcagtcccaccagcaatgagtgagaggtcctattgctctgcaaacttgtcagcctttgacttagtagttgcagcaggggttttttgttgttgatttttttttttttttttttttttttcagatttcctacatagatgatcacatcacctgtgaacaaagacagttgttgtttcgtttttccttcctaatctgaatagcttttatttccttttcttgttattgcattaggtaggacttctagtacaatgttaaaaagcagtaatgcgagggaacatccttgccttgtgcttgtttatccctaccttttgagcgcctagattctccaattcttgagcctttccagtgatttctggccaaatctctttgttgcttattgtcatttgcatcttcatgatactttgtagctttgctattcagtttatcctaaatgcttctcatcctgcagtattatgttaaaatctcttgttcatctttttttacactcacgtctcctttttcttatggatttaaccctttattccttcactatcattttaatggcattttaggaaggaggaaaaatacatgcattcaagcctgtgtgtttagtcacaaatgttcattttgttctctagccgtttgactccctatcagtcatttttgtgttcaccctttcattttaattattctattcattttgctgatttctgcactatacgtggacgctttaaaaatcagtcaaggctacttggacctacagatgtcagtttttgtctccatatgttttatgtagtagttaacttctcaaaccttaggaactaggaacatttactcttagctttcttttgtattggttgactaggccaacatcaaagattaaaccccacattagcctatttctgatatgttattaatagtctagtggtagaataattcacaagtaataatttctggtcctccattttagaagtttgggaagttgatgaacagatcaagaagcaacaggaaacacttgtgaggaaagtcacatccatctccaagaaaattctgataaaggaaaaagtcattgaatgtaaaaaagttgcgaaaatatttcctctgagttcagacattgttacttcaagacaaagcttctatgactgtgactcacttgataagggtttggaacataatttagacttacttagatatgagaaaggctgtgtaagagagaaacagagtaatgagtttgggaaaccattttaccattgtgcatcctatgttgtaaccccctttaagtgtaatcagtgtggacaagacttcagtcataaatttgacctcattagacatgagcgaattcatgctggagagaaaccttacgaatgtaaagaatgtggaaaagccttcagtaggaaggaaaatcttattacacatcagaaaattcatactggggaaaaaccgtataagtgtaatgaatgtggaaaagctttcattcagatgtcaaaccttattagacaccacagaattcatactggggagaaaccttatgcatgtaaggattgttggaaagccttcagtcagaaatcaaatctcattgaacatgagcgaattcacactggagagaaaccctatgaatgtaaggaatgtgggaaatccttcagccagaagcaaaatcttattgagcacgagaaaattcatactggggagaaaccttatgcatgtaatgaatgtggtagagctttttctcgaatgtcatctgttacgctacatatgagaagtcacacaggggagaaaccctataaatgtaataaatgtggaaaagctttctctcaatgctcagtatttattatacatatgagaagtcacactggtgagaaaccctatgtatgtagtgaatgtgggaaagccttctctcagagttcatccctaaccgtacatatgcgaaatcatacagctgagaaaccctatgaatgtaaggaatgtggaaaagccttcagcaggaaagaaaatctcattacacatcagaaaattcacactggagagaaaccttatgaatgcagtgaatgtgggaaagcttttattcagatgtcaaacctcattcgacaccagagaattcatacgggtgagaaaccctatgcatgtacagtatgtggaaaagcctttagtcagaaatcaaacctcactgaacatgagaaaattcatactggagagaaaccttatcattgtaatcaatgtgggaaagctttcagtcagagacaaaatcttcttgagcatgaaaaaattcatactggagagaaaccattcaaatgtaatgaatgtggtaaagccttctctcgaatctcatccctcactcttcatgtgagaagtcacacaggggagaaaccctatgaatgtaataaatgtgggaaagccttttctcagtgctcattacttattatacatatgagaagtcatactggtgagaaaccctttgaatgtaatgaatgtgggaaagcattctctcaaagagcatccctttctatacataagagaggtcatacaggtgagagacaccaagtatattaaatgaaagaaggcctcttaaattcaacccatgttttacttaaaatatcttggcataagctcaaaaaagccaggatctttatggaaaaattttaatactttgttaaaaggtgtaagactggaataaatggaaagaaataccatatacatagatggaaaaacccagtattataaaaacctcaattctgaaaatctatagactgaatgcagttccaaacaaaatcaactaagaattttctaggatctttcaaaaatgattataaaattcatgtgaaatagaagtgtatgaattgctgcgacaattttgaaaagaatagaggaaacaccctcactgtatgatataaagttatagtcatttaaaaatgtgtgatattagtacattagtaggtaaatgagcagattttaaagaatagaatatccagaagcagattcatgaatatatgtgaactcagtgtatgttagacctgacatcatgaattagtagggaaatgatgacctagtcaataaaattgctgggaatatttgactctccgtattggagaaaataaaattacaacattacgacatactaaaaaatcaatattcttttttttttttttttttttttgagacaagcgtctcactctgtcgcccaggctggagtacggtggtgcaatctcagctcactgcagcctctgctttccgggtttttttgttttgttttgttttgttttttgtatttttagtagagacggggtttcaccatgttggccagggtagtcttgaactcctgacttcaaaagtgatcgccctctttggcctcccaaagtgctggggtttacaggcttgagccactgcacctggccaaaaaattaacattctaaaggatttaaatactggaatttgaaaagccaaactgtgaaaccattgggagaaaatagatgatattgtctatgacgttgaggccaaggagctttttttttttttttttcaagacaaaaggactctgtaattccacttctaggtatatatacatcctatagaaactcacaaataatgcataagaaatatatatataatatatgtatgtatgtatagccagatgcagtggcacatgcctgtaatcccagctacttgggaggctgatagaagaagataacttgaggtcaggagttcaagaccagcctgggaaacatagcaagaccccatctcttaaaaaaaaagaaatatatagacatatatctgcattgaaaacaacctaaatattcatcagtggggtaatggatgaataaaatatgatatattcaaatgatagaatagtatacagcacttaaaagcagtgaaccagatccatattgtgtaacatggatagttaaaacaatgttgaatgaaaaaaatcaaaatacaaatgaaacattgtgtaataatatttatgtaaattggaatgaaatcatttataaagaacaactgtttctattattgaaaattgtatgtaaaactatttaaaatagaatagaaggatacacacccaattattgatagcattgtctctggagattgaatttgaggctgttgattaaaaggagactttagctttgcttgtagtttttataccttaaaaagactggtagcatataaaataaatcttaaaagctaattatacacaatgacaatatgaatgtttacttgtaatagtgtttttcttgttctttctcacaacaggccaagggaagcctgtgcccatagaaggaaatgttataatggattcatatgccctatcagatgctcaactattttatgaaaaatctctctagaaaattagtaattagaatattcttgtttattatataatgtgaaattagcacattttagcaacttgatgatgctgtgtttttatattttaacatttctgaaattggactcctttcaactgatgatatcttagattcaagtaaatatttaattattaaaaatttgaaaatcagatgccagtataacaaatgaaatgtgtttttatttactagctccgggcatcatgtctactactcacggtgcctgtcctttcagtggagccagtattattagacagcaaatttattaggttcatagctaactaattaccaatatatttagagtattgtggagagattaagatttttcctgggaaagtgactttgcaatatttgttttcttgccctgtaattttccatacaaccagcataggcattaatatcattgttaattataacaatattttgaaatgagaaatcatttatttcctgaggtggccataagcaattgtgtaaaagtgtgttggttttaatctagagaccattttattctttttacaactcttgacttacacagcccatccggttttggttggaaatggtggtgaacttagaccctgagcactaatagtagagttcctcttgaagagtctcattctctgtaataatacatgaaccaacccttacagaggtgatgtttttattatgccatctctacaatattagttgatatacattacagaaagctgctaatgcctttttaaaaaggagatagggccagacgcagtagctcaagcctgtaaacccagcgctttgggaggccgaggcgggtggatcacctgaggtcaggaattcaagaccagtctggtcaacaggatgaaaccccgtctctactaaaaatacaaaaattagccaggcatggggcgggtgcctgtaatcccaactactcagaaggctgaggcaggagaattgcttgaatgcgggaggcagaggttgcagtgagccaagattgtgccactgcactccagtctgcgtgacagagtaagaccctttctcaaaaaaataaaaaataaataaaaaggagataggctgggtgtggtggctcacgcctgtaatcccagcactttgggaggcctaggcgggccgattacttgaggtcaggagttcgagaccagcctggccaatatggtgaaagcccacctctactaaaaatacaaaaattagctgggcgtggtggtgcatgcctgtaatcctagctactcaggaggctgaggcaggagaattgcttgaacctagaggggcggaggttgcagtgagccaagatcacgccagtgcacttcagcctgggcgacacagcaagactctgcctcaaaaaaataaaaacaatacaaaggagataaaaatagggggtgtttgtgaaaagggatctttagcttttatgattgaacattaactacatttgtttgaagttgatttcacaaaagtaaatctcagactaaagatgtgaagtacaaccatgactatcagttttgattgttattaggtatttttgaagactgatggtgacttaacaacagcagggactgacttcagtgaaaacaatgacaacttacccaaactgaaatatctaaatgagtattatcatttcgtagtcccttcttcaataagttttatactaaatccagttttgctagcatacccaatatttatgtgtaaactttttttttttttttgagacaaagtcttgctctgtcacccaggctgcagagcaatggcgtgatcttggctcactgcaacctctgcctccgggttcaagtgattctcctgccttagcctcccaagcagctgggaccacaggtgcgtgccaccatgcctggctaattttttttttttttgtatttttaatggagctggggtttcaccatgttggccaggctggtctcgaatcctgacctcaggtgatccacccaccttggcctcccaaagtgctgggattacaggtgtgagccactgtaccagcctgtaaacctttttctttttttggagagggggtctccctctgttgcccaggctggaatgcagcagcatgatctcggttcactgcaacctgcgcctcctgggttcaagtgattctcctgcctcagcctcctgagtagctggggctacaagctcccgccaccatgcccggctaatttttgtattttcatagagacagggtttcactacgtaggtcaagctggtctgtgagccaccatgcccagcctgtaaacctttttttaaaaaatggttttcgcatttcgtgtatccacacaagtaaccctgtataaatatttgtgagactttttttttttgtctaaacagttgtttttatctgtgattttctttttaatgttttttgtttgtttgtttgtttgtttttggcctgtactttatatgccttaaatcctctgcccctttctttacatagctttagagtcaacagagaaatgtaaaattccacttaaggcccataaggacaaccttagatttctcttttggcctctctcaccccagtaagactggctgaacctatcaggtgaggtaaagtgcctcagagtaggtctaaaagggcgttttactgatcttgtgtcagcaagcagatgatctggtctctgtaaattcattttttccttctgtcctaaggggtagaaataataagatagatataagtgactgagacagactttgaaaaaaatcattaattaaatcatggtgaattcttcttttcctggacacacatgagttactgcctagagagtttccattctagagttcaaacttcataagaggttcagttcctgtgaatggcctcaaaacacacagaataaaacatactaatagtggcttggactagacacagcagtagaaattgatagatttcagatacattttggaggtgattcaacataatgagttcatatgaaagatgaggagtaaagagataaaggataactcctatgtttttatggaaagaaactggctggccggtggaccatttgataaaaatgcagcaggctggggagaaatattttagagtaaaggttggggatggactcaagatgtgtgatggactttcttttcagctgtttcccagaagcaggctttgagatgaggattcctatgcaagtgatttattaaggaagtgctttcagtaagaggggtaagagaatggaggaagcagaataagaaaaagaagtaagtcaagggtgtgatcgcaggcacagtcctgccatggatggtgtcatcctgatccctgtgggaactcgagtgtaagctatgcctcagacttttcaagattccaccttcaggactgaggcacttgtgctgccaacttctgagaatcttggctgctgacaactcacagctaaattcctctaaggaattgctgttggacgaaaggagctgccttatgcaaggttacactgtctcccttcaggcagcttggcccacgttgcctcagtttagagcaactctgaagagcaatcccagctctagagctccccagggaacaaatttcaactgcatcagtttaatttctctttccatccagttctgctttattcatttccttactgctgatgttcccaagagatctccccaataaaccctatcatagatttccatctcagattctcttttcctgggaaactgacttaaaacagtagacattttgcaacagtagtcctcaaattgaaatttaaaaaaaacttttttttttttttgagacagggtgtcactctgctgcccaggctggagtatgtgatgcaatcttggctcactgaaacctctgcctcccaggctcaagcgattctcatgcctcagccttctgagtagctgggattacaggtgtgcaccaccatgctcagctaattttttgtatttttggtagagatggggtttcactatgttggctaggctggtcttgaactcctggcctcaagtgatctgcccaccttggtctcccaaattgctgaaattacaggtgttagccacagcacccaaccaaaaaatatttttgattcatttgaaactaataaactcattacatgttaatacaagcaataaatttttatgaaattattttatgaaaaagaattatttccaaaaccaaaaaacataataagagcgtcattgttacacaactttcaaatactttaaattacttaaaagtagacagctgggttctcatatctgcttctacattcagtcacatgtcatgtaagactgggaaactccattcttactcatgagcaaatgagatcaaaagaaggaaaaatatgaaaatagtttcaatctcaaggccccctagggatttccagactgttctttttttttttttttttttttttttttttttaaatggagtcctgctctgtcgcccaggctggagtgcagtggcgcgatctcggctcactgcaatctctgcctcccgggttaagcgattctccctgcctcagcctcccaagtagctgggattacaggcgcctgccaccatggctggctaacttttgtatttttagtaaagatgaggtttggccatgttggccaggctggtcttgaactcctgacctcaggtgatccgcctcagcctcccagagtgctgggattacaggcataagcccacacgcctggctcaaactgttctttaactgctgttgtgacatttggtgtggtttcttcaaaaacttgatgtcatgggctaaagaggtgtataaacaggaggctaaagggaagcatgggcaagctctctagaagtggtctcagatggaggacttgagaaacaaagaagatggataaggaaaatgttaaatatgtgggtaaatagaaacaaatattggcaggtggaaaagaagagcaagattgatttacagggttttcaaaggccatgaaagtactgggaaacaatggtatataattcagtggattggagtgggtttgatttaaagtatttcaagtctctttactattaaatataaagctaatttttaagattcagattttgaaggattgtaagagacccaaaagattgccttattgagttgaggaagttccctttattcctaagtttgctgactgtttttattgtgattgggtgttggatttttgtcaagtgatttttctgcatctattgacatgattatatgatttttcttctttagcctcttgatgttatgaatgagattaatagattttcaaaggttgaatcaatcttgcatttctgggataaatcccacttgattgtggtgtataattctttttatatattattggatttgatttgctaatattttattgagtatttttgcatctgtattcatgagagatattgttctgtagttttcttttcttgtaatatgtttctcctggttttggtattaggataatgctggcctcatagactgagttagggaatatttcctttttctagaagagagggtagagaattgataaactttcttatatgtttgggagcattaatcagtaaacccatctgggcctgatgctttctattttggaaggttaatagttattgattccatttatttaatagatacaggcctgtttggattgtctgtttattcttggtgagttttgacagattgtgtctttcaaggaattagtctgtttcatgtagattatcaaatttgtgggcataatatgctttatacgcttttattcttgttcataatattctttctttttttcttttttctttttctttcttttttttttttttttttttttgagacagggtctctctttcgcccaggctggagtactgtggcacaatcttggctcactgcaacctccacctcccgggttcaagcaattctcttgcctcagcctcccaagtagctgggattacaggcgtgcaccaccaagcccagctaatttttttgtattgttagtagagacagggtttcgccatgttggccagactggtctcaaactcctgacctcaagtgatcgaacctcctcggcctcccaaagtgctgagattacaggcgtgagccaccacgcccagccaggtggagtctttagattttcctagatataggattatatcatcaacaaaaaggcacaatttgacttcctcttttccaatttggataccttttatttctttctcttgcctgattggtctggctaggatttccattactatgttgaataggagtggtgaaagtcggcattgttccaattcttagtggaaatgctttcagattttccctattcactatggtgttagctgtgggtttgttatatataacctttattattctgaggtatgtaccttctgtgcctagcttgttgaagtttttattgtgaaagcatgttgaattttatcagatgctttttctgcatctattgagatgattatatggtttttgtcctttattctgatgtgatgtatcatgttaactgatttgcatacattgacccatctttgcatccctggtgcaaatctcacttgattgtggtgtattatcattttgctgtgctattggatttggtttgttagtgcttttttgaggatttttgcatctacctttgtcagatatcagcctttagttttctttttatgttgtgtccttctctggttttggtaataggatgatcctggccttgtagaatgaactggggagaattctctcctcttttattttttgaaatagtttcaggagaattggtattagtttttctttgtatggtataatttggctgtgattccaagtgaccctgggcttttcttggttgggacactttttattactgatttaatctcactacttagtggtctgttcagattttatatttcctcgtcattcagtcttggtaagttttatgttttcaggaatatatctgttttccctaggttttctagtttgtcagtatatagctgctcgtaagtctctgacactctcttgtatttctgtagtatcagttgtaatgtctccttcttcatttccaattttgcttatttgggtattctctcttcttggttagtctagctagtggtttatcaatttgggttatctttttgaataaccaacttttcattttgtggatccttcatattgttttagtctccatttcatttaattctgctctgatctttattatttcttttattttgctaatttgtggtttggctttttcttgttttctagttctttgaggtacattgttagagtgttaatttgtaattgttctacttttttttttttttttttttttgagacagagtctcctcgctctgttgcccaggctagagtgcaatggtgtaatcttggctcactgtaacctctgcctcccgggttcaagtggttctccagcctcagcctcccgagtacctgggattacaggtgctcaccaccatgcccagctaatgtttgtatttttagtagaaatcgggtttcaccatgttggccaggctggtctcgaactcctgacctcaggtgatccacccgcctcggcctcccaaagtgttgggattacaggtacgagccactgtgcccagctaacttttttgattgcattctacatttattgctataagcttccctcttaacactacttttgccttatttcacaggtttgggaatgttgtgttttcattttcggttgtttcaagaaactttcctttggcctggcatggtggctcaccatgtaaaaatacaaaaattagctggggtggtggcacttgcctgtaatcccagctactcgggaggctgaggcaggagaatcacttgaatctgggaggcagaggttgcagtaagccgagatcatgccattgcactccagcctgggcaacaagagtgaaactccatctcaaaaaaaaaaaaaatttttttttctttcaattttcattttaattatgatctttagtggttatttgggaatatgatatttaatttccatttattggtatagtttccaaagttcctcttggtgttaatctctagttttattccgttgtggtctaagatacttgataagatttcagcttttaaaaatttgttgagacttgttttgaggcctactcgatggcctattatggagaatgttccatgtactgatgaaaataatgtatagtctgcatctgttgggtgaaaggttctgtgaatatctgttaggtgtgtttggtctaaagtccagtttaaatctaattttttaaaactctgattttttaaaactgtctaatgctgagaatgggatgttgaagtccctcattattattgtaatgcagtctctctctttagatctagtaatatttgctttatgaatctgggtacttcagtgttggctgcatatatatttagaattgttatatccactgctggtttaatcactttatggttatataatgaccttctttgtctttttttttttttttaactctttttgacttaaaaactctttaatctattagaaatatagctactcctgctcacttttggtttccattttcatggaatatctttttccatccttttactttcagtctatatgtgtcattaccagtaaggtgagttttttataagtaggatatttggggatctttttaaaaaaaaaatccattcagccattctctattttttaagtgggaaatttaatccatttatattcaaagttattattattattatgagatggagtctcactctgttgcccaggctggagtgcaatggcgggttcttggctcactgcaacctctgcctcctcagttcaagctattctgcatcagcctcctgagtagttaggattacaggcatgcgctggcacgcctggctatttttatacttttagtagagatagggttgtgccatattggccaggctggtctcaaactcctgacctcaggtgatcctcccacctcagccttccaaagtgctgggattacaggcgtgagccactgacctggctaaaggttattattcacatacgaagctttgtctctatcatattgttaattggttagggtgtttttttttttttttgagacttctgggctcaagcagtcctcccacctgagccccacaagtagctccccatgcaccaccatgcctgggtaatgttttttttatttttatagagatggagtttcactgtgttgcccaggctagtcttgaactcctgggctctaatgatcttcccctctctggctccaaagtgctgggattacagatttaaaccaccatgcccaggcttttttgttgttttatgttttttttttttttaatttgttttcttattgtcactgtggcttggtagatttctgtagtagtaccatgtgagtcctttctctttcttctttatgtgtttgctttaccagtgagttttatagtttaccttattttcatgatggtaagtgttgcagtgtttttttttttttttttttttttgcttccaggtttaagacccccttgagcttttctttctttttttttttttttcgtttctgaggcacagtttcactctgccacccaggctggaatgtagtggtgtaatcttggatcactgcaacctccacctctcaggttcaagtgattcccgtgcctcagcctcccaagtagctgggattagaggcatgctccaccacacgtggctaatttttgtatttttagtagagacggtcttttaccatgttggccaggctattctcaaactcctgacctcaagtgatccacccgcttcgacctcccatagtgctgagataacaggtgtgagccaccacacccagccttcagcttttcttgtaaggccagtctagtggtaacaaatttccttagcatttgcttgtctagaaaggtctatttctcctttgtttatgaaggataattttgcttgatgtagcattcttggctagttttctttttttcttttagcactttaaatatatcatcccattttcttttgacctataaggtttctgcttagaaatcctctattagtcttatggggtttcttttataggtgactagatgctttttttttcttctaaggattcactctttatctttgtttgacttgaaacaatgtgaatataattgtgccatggagaaaaactttttgcattttatctccttgcatattgtgagccttctgtatctggatgtctgaatctcttgttaggctttggaagttttcatccataattttattaaataggttttcattgctaaataatggtaccacaatcacctgttaatgaatagttgtgttgtttccagtttggggactatcaagaataaggctaccatgaatatttgtgtaaaaattatttgtatagatgtatgttttcatttctcttggataaataccaaggattggattggctaggtagtatatggagatacgaattttatgaaaattcttaatttcagacctgtcaattcagtctcagtagcttcatttttcttagcttgataaatgatggaaatattaacccagtggcaattttatgtacgaacactgatgaatgtcagcagcactaggctttgggcagagtgccagaacaaatggcaaagcaaagcctcaacagctgctcctggggcataattaatgaccatgtcctaaagacattttagtgttaacatataaccagctgctgtttctcctgtaactaaatttaacaactgacagcaatatgaacagcgttttatgaaatactcccaatacagtctctattaaatgaatttggcagagggctatgctatgactggtgccctatttcagagttgttttttaacattggtaatatcttttcatgcattagaaaggcccaagttggccgggcacagtggctcacagctgtaatcccagcactttgggaggctgaggcaggcgtatcacgaggtcaagagattgagaccatcctagccaacatggtgaaaccccatttctactaaaaatacaaaaattagctggccatggtggcatgcgcctgtagtcccagctactcagaaggctgaggcagaagaatcgcttgaacctgggaggtggaggttgcagtgagccgagattgtgccactgcactccagcctggcaacaaagcgagactcagtcaaaaaaagtaagaaagaaagggtggggggagggacggagggagggagggagggaggaaggaaggaagggaggatggattcaagtcacataaacatttgttagatttgcttctgaacctttgtgaaatattactttcttgttacatagtgggcagtaactttgtaagatctcaggaaggaaggaaggaaggaaggattcaagtcacataaacatttgttagatttgcttatgaacgtttgtgaaatattactttcttgttacatagtggacagtaactttgtaagatctcctaagagaaggaaggaaggaaggaagggagggagggtccaagtcacataaacatttgttagattcgcttctgaacctttgtgaaatattactttcttgttacatagtggacagtaactttgtaagatctcctggtgtccagaactcaagcttgatttctgctgtttctgaatatctcttaaagaaacaagtactggaggcagagaataacccattaagtgttctctgaactatgaggcatctgagcctatctgatctttaagtcaaaataatgaagtgagccaggcatagtggctcatgcctataatcctcgcactttgggaagccagggtgggaagatagcttgagcccaggagttcgagaccagcctgggcaacatagtgagaccctgtgtctacaaaaaatttttaaaaaatttggcggacggtgtgacacacacttgtagtcccagctacttgggaggctgaggtgggaggatccttgagctcaggaggttggggctgcaatgagccatgatcaccactccagccttggcaacagaatgagaccttatctcttataaataaataaacataaaataatgaagtgaaagtcgatacaagaggtggtggagcttgtagcagatgacaaccatgtcccctgaggtgactgatacctccagtgttagaggtggaagagcatcacctctaaataaaaatgatcttctgcgctctcctagttgggacactagtctttggggacaagcaagtactataagagggacttgtatctatacaaagacttgtacaactgggcttgaaattttcattaagcatgtaaatgttatcccactttcttgggaatctttgattattgctatggtttgaatatttgtcgcctccaaaattcatgttgaaatttagttgccattataacagtattaagaggtggaacctttacaaggtgattagctcatgagagctccacactcatgggtgggattcatgctgttataaaaggacaagttgggcatgcttttatctctttgcctgtctgccttccatgtgaggacaaccatgtatcataaatatggccagtgagatacaagcaaaaatatttgggggtaatgggtatttgaaagcattttcttccttaatttaaaagggacataatcagccaacacagtcttttcccttgatttttgtcaacagcagagaccagcattgagtccctgatatagcagcattcccttttggaaccagctagccaccttatagaaggccgaatacactgggcctgttctgtcatggatgagacagagattcattcttataagcatggacagatattctggaatagattttttttcttgcccgtaatgctgctgccagcatcacaaccatggacttacagaatgctttcatgctttctccaccattatggcatccccccagttttgtgtgtgatcaaggactttttttttttttttttttaagagtcttgctctgtcatgcaggctggagtgcaatggcgtgatctcggctcactgcaacctctgcctcctggttcaagcgattctcctgcctcagcctcccaattagctggaattacaggtgcacatggccacactgagctaatttttgtatttttagtagagacaggtttcaccatgttggccagggtggtctcaaactcctgacctcaggtgatctgcccgcctcggcctcccaaagtgctgggattacaggcgtgagccatagcacccagcctgattacaggatataaggttaatatttaaaaatcaggccacgtgtggtgggtcctcaggcagatcacctgaggtcagaagttcaagaccagcctggccaacatggtgaaagcctgtctctactaaaaaatataaaaatcagttggaagtgattgtccatgcctgtaatcccaactactcgggtggctgagacacgagaatcgcttaaactggggaggtggaggttgcggtgagccgagattgcaccactgcattccagcctaggcaacagagactctgtctcaaaaagaaaaaaagaaatggggtcttgctttgtttcccaggctggtctccaactcctggcctcaaacaatcctcctgccttagtctcccaaagtattgggattacaggcgtgagccatcatgcctggtccatcttctcatttggatagctgtaccttgctaggtagaaatagagttgtttcattgttgtaaaggagctcaagttttgtataaaaaagtgtgtagaaacttagtacccaaagggttagactaggtcagttatcagtgtattgcctctcagctccaaattaaccttttcaacaccagtctgtgaaagtggacaacttgaagcatttctcctttacagtgagtgtgatattaagctttgtcagtagagggtgtggacattgaagagggacattgaaggaagaaggggtctttctggctcaggttgcagcattttgcttttccttgctcttgcttcatggtccatcagtgggaggtgtgtatgtgagaatattcagcgatgctctgcgccagctgtgctccagagcatgcagtctcttggagatcttgcatatctggcctgggcctggcagactaccttgctgaggcccttctcatgagagaccgtgtgctccagacctcatgctcacagtggcacccaaactcctctgcatcctggccatcagccgtagcttgcttgtgcaatggggagtaatttcctgtagctgtcctgatgtggaaaccatgcatctcaggcctaaggcctacagtgccactccaactctctttgagtacctggcaacgtagcaaacttctccagcatcacactgagctacaaccacattcagtgaggtttgaaactcacccttgggaaagacctccttccaagtatgttttcttttgggtactctccctcagctctaaagggccttttagagtcctcctcatggccctatagtttctgtcctatcattgcttaataattctttatattataattctgtttaaattcctttggccaggcacagtggctcatgcctgtaatcccaacactttgggaagctgaggtgggtggatcacctgaggtcaggagttcaagaccagcctggccaacatggtgaaacctcatctctacttaaatacaaaagttagctgggcatggtggcaggtgcctgtaatcccagctacttgggaggctgaggcacgagaatcacttgaacccgagaggcagatattacagtgagctgagatagcacccctgtactccagcctaggcaacagagcaatactccttctcaaaaaaaacaaaacaaacaagcaaaaaattcctttgtggtttctgtttcctgactgtatccagactgatacaaactgaccatagaagctggctgctgatgcttaaaaagcttctcatccatccatttctggcaaaagcccatcatcattcaccaagaccttcacacttaagctttccatgatacccaactgcttaaagtctcataaggcaggacagtttgccatcaaccaaaagcataatgagttgtttcatcacaatggtcctgtctccatggcagatcataatgtccacagtaaagaatctcatctttctctacaagataggtgtttttgccccattagtgcttggaatagaacactgggcatgaaggagaatctcaacaacatgaaaatgcatatctcttaacagtggtgttgtagtttcttgtgggctaaattgaaaacccaggaacaaaataaaaacttggttgtatttgaaattatcccataaaatatctaagatgtcctacaaagcatataacatggatcagttatccaacactgaagaataatatgtatatatgtgtgtcaactgtacaccataatatccatacatggtagaaagtccacttataaaatgtaatttcatgattcatatttatatgagaaaaatacatacaaatttatatgagagtaacacatattaatttacatgaaaatgtaacatataccttatattaaatatgcatatgggccaggtgcagtggctcacacctgtaatcccaacactttgggaggccgaggcaggtagatcacgaagtcaggagatcaagaccagcctggccaacatggtgaaaccccatctctactaaaaatacaaaaattagccgggcgtggtggcgggtgtctggagtcccagcttggacccaggaggcagaggttgcagtgacctgagattgcgccactgcactccagcctggcaacagagcaagactctgtctccaaaaaaaaaaaaaaactatatatatatatatgcatatgattgttaaaaaagaggagattcatatggtctgaagttatcatccctcaggttacttaccaattaaaaaggggaaaaataactacaatggagacatgtggccattaccatcttagccaagtgatcaaattggctcactgcctcaaaaaaaaaaaaacatgtttagtactgaagtataatgattcttgaatttattttcaaatggtagagagagaatcaaaagtggcaaattgttaaattgttgacaatttgtgaatctaagggacaagcatgaatgagttctttttttttttcttttcagagtcttgctctgtcccccaggcaagagtgcagtggcacaatctcagctcactgcaacctccgcctcctaggttcaagcgattctcctgcctcagcctcctgagtaggtgggattacaggcacgtgccaccatgcctgtctaattttttgtatttttagtagaaacgggctttcacggtattagccaagatggtctcaatctcctgacctcctgatccagccacctcagcctcccaaagtgctgggattacaggtgtgagccaccacacccagccccaatacaagttctttgtagtattctttcaatgcttctggagatttgaaacttgccaaaataaacaactgaagtaaatgtgcctaggaagtgggaaggcactgagcttattggggacatacccaaagaccccactggaacagaactaaagaaccagttctctgattcgttaccataagagaggaagtttcaggagaaggaatgcaaaagttctatatcctaattgaaagagagcgaaagaaaatatctcaagcaaggaaggacaggcttatcaaggatatagttttttgatgaatgacaggtcatcccaacctcttcctgctgagggaagatttcttcatctagatactgaggtcagaagtgtgaaatgagtcctgtgggctaaaatccaggtgtcataaaaccgtgttctttctctaggttctaggggagaatctatttccttgtcttttccagcttctagaagctgcctgcgttcttttgcttatggcactttcctccgtcttcaaagcacatccccgctttcgttgtcatgatttcctctctgactctgaccctcctgccttcctcttttaaggacccttgttgggcctactcagtaatccagcataatcttcccatctcaagatttttttttttttttttttttttttttttttgagatcaagtctcactctgccgcccaggctggagtgcagtggcgagatcttggctcactgcaacctctgcctcccgagtacctaggactacaggcatgcaccatcatgcctggctaatttttgtatttttagtagagactgggtttcaccacgttgtccaggctgatctcaaactccttacctcaagtgatccgcccacctcggcctcccaaagtgctggattacaagcatgagccacgatgcctggcctccatctcaagattattagttgaagcatatctgctgcagagcctcttttgccatgtaagatatattcacaggttctgggggttaggatttgaacgtcttggggcattattctaccactttgtcttattggcataatttatgaatttcttttttcccaatcctttgacataactatataaattttatacattattgaaatcagccttttatttggaacttttgcatctataaccacaaatgaaattaatacttttcttttggcctgtctttattgaatttcttttcttttcttttctttcttttggagacagtctcgctctgtcgcccaggctggagtgcagtgccccaatcttggctcactgcaacctctgcctccgggtacaagtgatcctccagcctcagcctccccagtagctggaagtacaggtgtgcgccaccacatccggctaatctttgtagaaagggggttttgccatgttgccgaggctggtctcaaactcctagcctcaaagtgatgctcctgcctcagcctcccaaactgctgagattacaggtatgagccaccatgcccggccatgtctttaataaattttatgccacttagacaaaaattcattggagagcatatataagttggatataaatacattgaataatcattattagttcaaaaattagctaaaattcagctataaccatctgggtatggtacctttttaattgtacatactttaaaatatcttaaataaaataaagcatttcattatggttattattctgttcagattttctacttcttagtagaaatcagtgatttaaatttcattagaaaatctacagtttcctctaccatggttatagagttgtacataacagcctcaaaattcttttaaacccaggcctgggcacggtggctcactcctgtaatcccagcactttgggaggctgaggtgggcggatcacctgaggtcaagagtttgaaaccagcctggccaacgtgatgaaacctcgtctctactaaaaatacaaagaatacaggcgggcacctgtaatcccagttacttgggaggctgaggcaggagaatcacttgaacccgggaggcagaggttgcagtgagctgagacggcatcactgcacaccagcctgggcaacaagagcaaaactccgtctcaagaaaaaaaaaaactcttaaactctttatgttttttttttcgcatttctaatgtttttgctttattttgctcttgtatatcagtcttgtgtttcatttatcttttagtactaaactgtggatttttaaattttggtccagtagtttgttttctagtttgtaaactagaaatacttaagaattttttttaatgaaatgttataagtaatgtttcacaagaaagaaacgataatggccaaaaatataagggactactttttaactgaaaagaaaaaaagtcacaattacacatcctagaagttaactgctgttaacaattaactttaaagatattattgcccaagtgcctatgtttctgctatttataactttgttttttttctttttgagacgcagtctcgctctatcgccaggctggaatgcacctccttagtagctgggactacaggtgcacaccaccacgccaggctaatttttgtatttttaggagagacgaggtttcaccatgttggccaggatggtctcgatctcctgaccttgtgatctgcctgcctcggcctcccaaagtgctaggattacaggcgcgagccactgcgcctgacctatttataacttttttttttttttgagatgaagtctcactgtcaccaggctggagtgcagtggtacagtctcggctcactgcaacctccgcctcccagattcaaggtattctcttagcctcctgagtagctgggactacaggtgcgcgccaccacacccaggtaaattttgtatttttagtagagacagggtttcaccatgttggccaggatggtcttgatctcttgacctcgtgatccgcccgccttggcctcccaaagtgctgggattacaggtgtgagccaccgtgcccagcctataacatttttaaatacagtatttattttaaaaaattggtttattttagtagcacttttagtaacacaaaagtgcttttattttagtagcacttttagtaacacaaaagtgctactaaaattggtttattttagtggcacttttccaggtcctaaagtatttctcgaacatacttctgtcattaaatatccttctgcaacttaatcctcaaataatgacgttgcagcccactatattggttttccgttatttccgctgcagacccaactatccctcatccttctccagtcccttcggcatcctgagcctgtgactgcgccccttcagtctctcctaggccacatccccaaacctctaggacaggtcgtttcccagacaccctccaggccagcctgtggcccggcccgagcagaaattagtgacttaaatgttgagatgccagaagacctggactggggcatgaattcccagcccaaacttagccacccggctttatcgggattgtggcccaggtcagtgaagccccaggtccgggccgactcctaattcgtggcgtggccgggagtcgccctctcctgatccaccccagagcgcggctccctgtggagggtaccctgggtggtccgctccctggctttttacagcacttgtgagaggcctttgggcacacacacaaaccccactccctgaccctccgtttggggcgagggcggctgcagccgggttaacttcgcggactctggaagccctggcggcgggcccggccgccccttcccgggtttgcggctacatttttctgaagcctccacggccccacagcctttttctagccgtcagcggccaactattgctgcctgggcctgtgtgtttgcccagttcctgggagggtgctcgggtgcagctgggcagtctggcctcggcttcactggaggcggggaactggacatgactgtgagcgccagtgaccgtggtgcggtccaggccccgggtggcgcacccacctctggactacatttcccagggggccccgcggccaaccttttccggccgaagaaggctagtcacctttccttggcgggtgttggaaagcaaagggctggaacgtcccgggctgcggagctcgctgggttgggatggactcgttcagacctgagtgctaggacgccgaagggggcggtgaggcgtcccggcgaggagctggggtcgtctggagtttaaaagacaggtggctctcggagatgtgcgggctgcatgcccacgcttcaccgctaggggaggtcagggctgtgcgatggggaaggaagagagtgtcggggcggtgcagtcgggatgggagaagggtgtcagggccactggcccccagctcggcagagggcagtgtcgggccgcgcgcaggcagggagtgggtgtggtgtgaggctggcgctggagcggtctgggaatgttaggaggtctagggtatcgcggccctgcgtcctcttgtctggactaaaagtccgggcagttctccccggacctggattgtgggcccagcgacaggtgcttggcgatctgtgcccgctgtgcctgcggggctgtggtgggagtcctgtctgcacggtattctgtgtggctgtgcatgtaagtgtgagcgtgtgccgggtcatcgaccccatctttgggaggcctgggagggggcgggacaccctcgctgtacattctggggatacgctgggcggggtctgccctgtggatgggtcctggccgtctacgcaaaccccaactgagactagtcagtaggtagtgaatctctgtgaatggccttccctccatcgggtctatctctggtgtgtgttgagggtggaaatggttctagagtttggggctgggaagtccctgctatatccacttctctgttctttcacccagtagccaccagggatctagacccataaaggtgcccccagcctaaaggacagcagtttgagaccctgacaggtgggtccatttaagctgtgtcttggcgccacagacttttgggctcagtgtaagacgctaggcctgaaagtttcccaagttaggctgttatggaggaagagggctacggtctggggggctctcccaggacttctctctgggctcctaaggtcacctgcatttctttgtgaggatgacagagagcggtggcgttgcagcttctttggtctccctttcagtgcctggggtggggcaggagtttggcctcccaaggggttcagggagggattcaggatggcttcttaacgtttttccacatctttctttaagaacccagaagaggagagaactgctgtgcgtctgaagtgatggcggaggtaagttgcatttgacattttcttggaaaggacttactggttttcaggacagtgtcctatttcagaaatttatctaaaatatttacattcatgatttggacaaaggggaagaggggaggaaactgcatttatgtagcattttcctaaagcagcctagggctgtctattttgcaaacattgtctcatctgatctagaatttccacttccctggattttattcatgctcacaacagtgttgacagagaacatgcctcagtgatttggcagggaaattgaacaacagaattagctttttcagtctcactgatttctgcattgtcccctccatgatcatatgcaatagcctttttgcttaccaattttttttttttttttttgagacagagtctcgttctgttgcccaggctggagtgcagtggtgtgatctcagctcactgcaacctccgcctcctcggttctagtgattcttctgcctcagcctcctgagtagccgagattacaggcacacaccaccacgcccagctaatttttgtatttttagtagagacggggttttgccatcttgcccaggctgatctcgaactccttaactcaggcaatccacctgcctcggcctcccaaagtgctgggattacaggcgagagccatcttgcacggcccgcttatcaatttctttctttctttcttttttttttttttgagaccgagtttcctctgttgcccaggctggagtgcaatggcacaatctcggctcactgcaacctccgcctcccaggttcaagcgattctactgcctcagcctcctgagtagccgggattacaggcacgtgccaccacgcccggctaattttttgtatttttagtagagatggggtttcactgtgttggccaggatggtctcgatctcctgacctcgtgatccgcccgcctaggcctcccaatggagccttgctctgtcgccagttaggagtgcagtggtgttatctcagctcactgcaacctccgcctcccaggttcaagcgattctcctgcctcagccttgcgagtagctgggactacaggcgcatgccaccacgcccagctaatttttctatttttagtagagacagggtttcaccatgttggccaggatagtcgcagtctcttgactttgtgatctgcctgccttggcctcccaaagtgctggcagcaggcgtgagccaccgcgccaagactttttttttttttttttttttgagacagagtcttgctctgtcactcaggctggagtgcagtggtgtgatctgagcgtgatctgagctcgctgcaacctctgcctccctggttcaagcaattcttctgcctcaacctcctgagtagctgggattacaggcgtgcgccaccatgcccagctagtttttgtgtttttagtagagatggggtttcaccatgttggtcaggctggtctcctactcctgaccttgtgatctccctgcctcggcctcccaaagtgctggaattacaggcgtaagccaccacgcctggcctcaatttcttataacctggaatgcctacctgtccactttatctccggatagtttttcaagatagaaataacctgaatgccctcttatgattaaagtgatatacaatttttgcaaaagtttcaaaatttgagggagtcacaaagaaagtttaagtcaccccatccgtggtcccactatccagatggtcactattaatgttttcagattattttgtctgcttatatgtgtagtcatgtgatttttttttttcagagtgggttcatactactaacagaagtagctaacttattgagcatgcactttgagccacttatagttggactttctttacagatgtgatcttgtttaatccacataacaaccctattagacaggtatgactatatttcattaattctctgatgtactttttctcacattttaatctctctgaaatcaaaatggggtttacaaaaattcttggcaagtcatagtttcattgatggcatttttttttctttcctagtatataaagttataagggccttattatcagtgacatctcagactcaatgaaatagagtattattctaagttgacaactgaggaaatcaagtcactcgcctcaaagttacgcagttaaaaatggtagagctggccgggtgcggtggctcatgcctgtaatcccagcactttgggaggccaaggcgggcggatcacctgaggtcgagagttcaagaccagcctgaccaacatggagaaaccccatctctactaaaaatacaaaattagccagatgtggtggcgcatgcctgtaatcccagctactcgggaggctgaggcaggagaatcggctgaacctgggaggtagaggttgtggtgagccaagattgcgccattgcactccagcctgggcaacaagagcaaaactccgtctaagaaaaaaaaagaaagggtagagctggggtttctacatcacctactgacttcctttgcccacttgtcaaagaatgctattttttaatttattttaaacaacatttcatatgttcagcatattttctctttgtcatttatacgttgttttagaaatattttttcacagttaatctattttgtgtgcttttagattcatttagttttcataaatgtattcagataaatcaactcttttcttaaaatttttccctttttgctgtgccagatggtctttcttaccacaaaaatagaatagttacttttatattttcctaaaatactttctgtcttttatccaaacaatctagtctttaaggtgtctcctgtgatatctcaccagagaatgttggctataaaattccaaatttggagtgtttatttagattttttatgcaactttggagtaatatattttaaagagtggcatggtatttgtaggatgtgaaatttaaggtttttttgttttgttttgttttgttttttgtcctggatatgtctggatgtagcacttacttcattaattctggccagtcctcaagaattactttcactctaagactaaagaaacatattttctattctgaattaatcagtttctttctctttgatttttcttcagaattctgtaagaatttgttgaatttctcttcccattactgtagaggccaaaaccttcctaagattatcagaagatcaccacaccctccccgtccatgccctgcacactggtggggaggaagcttcagttccccttgcacttcaacccttcattgtctatttctccctgtatcttctgtcctgaaaatattaattgccctttgtccctgctaatgggaggctgtgcattgtgatgaaagggtagaatcttagcccatttctgccatttgctagctctgtgaccatgggcttcctcataatttcagtttggggaatgtgatgataatggaaattcacctgcacttacactggcaacctggggtcccccagctcctaccttctggtctccccaacatccagtgaagtgcccaatttcattgcttcttttcttttcctgttctgtgagcttatgccctagggcctcactccactgtcttttgccttgtgggagtagatactacattgaactgattgggctccctggctccacttttactctttgccaataagataatccagtaatgtcaccttttgaattttgttcagtgaatccctggtactttcaggataaatctccaactctttcacgttcattgcatatttactaaaaagcatattctgtatttagcagagcacaaagcctaatgttggagtaaagtggtgagcaaagatgatgtgtttagtcctggcaggtataacctgtcattcaaaacatttcctgccctgattcctgtggagttctccaacatcacttctctctactcctccctcagaacccctcatcagctatcccagttaactttctgctcctcagaaacacagggtgcaattggtctcccttcttacctccatcttctgctctctctacttggagtgctgttcagtgtgttttctgcttgttggaattctgttccttttctaagtcccagttaatcttccacacgttacgtgaaactttccccacacccctcaatctgagtaggtcactattttcttatttcctatagcaagattcttcttttaatgggaggcaacgtatcctgcttaaaaacccctcagttaattatttcatctgtgagaacaagtttaaatgtctcaggattgatccttcttttcagcctcgtctctctgctctctctctgactttacactagtcgtgttaaactactagcagttcccagattgcacagtctatctcatgcgtccattgtgcaagaaacacaagaagggcatttatccctcaccacccctttctctgggttctactgaacctagtcaagaacagcatctatgaaacctgtgtcagtctcatggttgcgcttggtctcaattgctgtatctcttatagtcgttttcatactatattgtaactatcttttttttttttttttttgagatggagttttgcccttgttgcccaggctggagtgcaatggcgcgatctcagctcaccgcaacctctgcctcccgagttgaagtgattctcctgcctcagcctcccgagtagctgggattacaggcatgtgtcaccacacccagctaatttagtgttttttatagagacggggtttctccatgttggtcaggctggtctcaaactcccgacctcaggtgatccgcctgccttggcctcccaaagtgctgggattacaggtgtgaaccaccgcacctggcctttaactgtctttttaaaactgctttttattaaatattgaatagtagaacatgtgtaatatattaagggggactgaacacccatgttaagaggtagaatgctaatgttagaaatcccatgtgtgctttgatcttcccaatctaaatccccttctttagctgtcagaggtatctgttattccgaatcttgtgtttggcatttccttgtttttctttacagtcttaaccatatgtgtttattttcctgttctaatttgatgtcaagaaatcatactgtttggatttttctgcaactctattacttgtcctccaacgagtgttcaagagatccattcacattgcaaacttatcctactgtatagccatccattgtaagaatacattttttcatttatattgtgtacattactccagtgaacattcttgaactcctctttttgtatcctgtgcaagaatttctgtatgtaactaaaaaaggaattgctagctcataggttatatgcattttcagccttactcaacattgcccagttgttttctaaagtgtttattatactcatttactattccttttacttcgtatcctcaccaacacttggtattattaaattttaaatttttacgcacttgggtatgagttgatatgtattattttgatttcaaatttgcatattttggtactaaatgaggttgagccccccacccccgcaactttcatgctcattggcattcatgttttctcttttctgaagtacaattttatgtcatttctaatttttctattgatttttatatttccagagtttttgttccttttaatgctttgtatgcatttcttaaatattgtggattgtcgtccttgccggttatatgtgctgtgcatgctttcttactttaacctttaaatgatggtagatattctcaattttaatgccttcaaatttaatgctgttttctttaatttatttacatcttgtgtatgaaatctctcctctcctaagagtaaagatattatccctattttctataaatgatattattttgcctttaatgtttaagtcttcaattcacttggaattaattgtagggtgtggtatttccatttggataatatctgaaacatcatttattgaaaaggccattgtaaaggattaggcaaactgcaaggtctgagggaacagtccctacaagatgccgtcactcagacaccagctacaacttaagaggttcccatgaccactctcactttagaccagctagctacaaattcaggtatttccaccaccaccacccttaggtataataattcagtagaaagcctcacagaactcaatgaaagctgttatattcacagtcatatttataacagggaaaggatacattgggttgtattaccctcccagtattgatgtttggcagtacacccagagtattgtcaaccagagaagctcactcaagcttcagtgcccagtttttactgaagcttcattacataggcatcattgattgaatcattttccatgtgcacgaactcagtttccagcatctgtcctccctccttgcctgaaagtcaagctgataccacacggctcaaagtcccaagaccgattacatggtagaagtaggtgtggccagccccaagccctagtcatctcatgagcataaactaacagacgtggtcttaggggctcaccataaataacaaagacattcctatcactcaggaaattcaaaatgtttagaggttgcttcccaagagctgggacaaaggccagacctctttttggaggccacattccttactacacagtcctcctttctatgtacttcagtggcagttctgtcataaattaagtttccctatgtatatgtttgtctattctgggctctcctttctaatctgtccgtccgtttgtctatttaaaccatactgcctaaagactgctttctagtaatgtctgatatttggtaagtcacatgcctctactatggtcctgttctctagaaaggtcttagctgttcctaggttttggcttcatatacattttagaattggcttatcaatttctgtagaaatccagttgggataatgatttataatgcattaaaccttcgatcaatttggggaaagttgacatttttacggtattgagtcttcctctgcctctaaataactctgcttacttgagtcttgtggaatggttttcaataaatattttataattagagtcttacacatcttttgttaattttatttccaggtatttttatattttgtgtttttcttagatgacattaactttagaatatagactgggtgctgtgactcacgcctgtaaccccaacacgtaaggagaccgaggcaggcgaatcacttaagcccagcagtttgagaccagcctgggcaacatagtgagaccccatctctactataaataaaaaattagccaggcatgatggtgcatgcctgtagtcccagctacttggtaggctgaggtaggagaatcactcaagcccaggaggatgaggctgcggtgagctatgattatgccactacactccagcctgggtgacagagcaagacccagtctcaaaaaaaaaagtaaataaaataaaatataattttctcattgtttctggtatatagacttgccattgatttttttttttcttaaaactcctatgacagattattgcagttgattttgagatattgattttatatccccccaccttgcttaactcttatttattctgacgtcttgtagattcttttggatgtggggtcatccaacttgatcatatcattgatgaataaagatactttttggttgtaaataattgtctttgtctattagtattgatttcttttcttcttttttaacctttattttaattcttatcttgctgcactggctccacctcccagaacagttttgaatggtgaatatgggcaccctgtcttattcacagttttagatacttcacttttacttatgtttgcacttgttttttttgtaggtgtcctttatcaggttagggacgttgctttttattgctaattcgctcttgagtttttatcatgaaggaatattgcatttttaaaatgccttttctgcatccattgaattgattggtcaggtgtggtggctcatgcttgtaatcccagcactttgggaggcttagtcgagcagatcacctgagatcaggaattcgagaccagcctggccaacatggtgaaaccccatctctactaaaaatacaacaacaaaaaattagccgagcgaggtggcaggtgcctgtaatcctagctatttggaaggctgaggcaggagaatcgcttgaacctgggaggcagaggtttcagtgagccaggatcgcgccattgcactccagcctgggtgacaagagcaaaattccatctcaaaaagaaaaagaaaagaaaagaaatgatcctaagtgttttctctttaatctgttaacgtgcctaataattttaatttatttccagtatcatgtacacctttattgggaaaaacctaacttagccatgatgtgtgatgaatttttacatattactggattcagtttgctaataacttgcttagaattttaaatctgtggcatgtgtaagactggccagtaatttcaattcttcataatgtctttatacaagttactctatcccaggagaactgtggccttggcctgtgaaccaagattgttttctacatttttaaatggttgggggaaataatcaaaagaattatattttatgacacatggaaattatatgaaattcaaattttagtgttcatgaataaagctttattggaacataaccacattcatccatttatgtaacatctatggctgcttctgtgctgcatggcagagttgaggagttgcagcagagatggtatgtcccacagagcctaagatacttactatttggcccttgacaaaaaaagtttgctgacctctggtctagcctcataaaatatatcagttttccttttctttttcccatggtaggatctgggagtactcatgttatcaatggtgtgagcaaggccactcttcagattatttgtttattccctgtcttctatgccatttactacccgcatcctccccccgcccataaggcagtcgtgttaatgtgcatcgttttcttagtatgtattcattcatgcaaaatgtttttctcttttgttaaggtccagggtggtcagtttttcaaaatcttccatatatgattgagaagaatgttatttgaattgagtgcattgttctatatgcagccattagatcaagcttaatttagtatctaaatattctgtttttactgactttttgtctgttgtatctatcagttatttctagtgttttgttaaaatctgccactgtgattagggttcgtctattagagtttctatttcatttatgcatatgtgtatgtatatataatatgtatttattatttattaggtaagcataaaattatccttttctaactgtcatctttctgaatatttatgttttggatgtgtctctaataaccagcgtagagctgggctttggtttttgacaactttgaccaactttgtccttttttttttttttttttttgttgagacagagtctcgctctgtcgcccaggctggagtgcagtggtgcgatcccggctcactgcaacctccacttcctgggttcaagcagttctcctgcctcagcctcccgagtagctgggattacaggtgcatgccgccacgcctggccaatttttttgtatttttagtagagagggggtttcaccgtgttagccaggatggtctcgatctcctgacctcatgatccccccacctcggcctcccaaagtgctgggattacaggcatgagccaccgcacctggcgaccagctttgttctttaacgagagtatttagtcatttacagtgcttgtaattactaatataattgaaggtatcatttttgtgcttttaattctaccttttctgtatttcattatcttcatttcattttcccttctatgagtttgaaagttataagctatttgtgtttatttagtggttaccttgaaaatttcaatatactttcttaacttactagtgtctaaaactaaaaaatattattatattcttggtaaataaggaagtaggatatattctaactaatcaaacaacttacattattgtcaggtatttttcttctttttttaacccataagaaatttttattttatgtattgagtgttatcttagattatccatgtatttacgactttcttggttcaccattctttcttacatgtcaagctctccatctgggatcactttcctttagatggaattaaatagtaaatttctctctgattttggtgtttgttttttttttaacatctttatttgccctcatttgtgaaaggtgttttaccctcacactgggatattccgctgtcttctggtttacatttttgttattaaatagtcatctgtcaatcagacttttttttttctgtagataatctatctttaatctcaaattgcttttcacgtattctctttgtatttagtgctctgcagttttggtgtgattgtctaggcatggatttatttttatttattctgtttaagacttattgggcttcctgaatctgaataatgccaattctgaaaatttcttagctgtcctgtcttccaatactgccattttcttaattctttctcttttctccttctagaacttcagttaaatatctattaagccatctcacattatcttcttaatctctcttctgtacatctgctcatttgtctttttgaattgcattctgcataatctctttttataccttgcagtccagtaatttttctcttcagagagatttattccagccattgtatgatttaagtatgttttttattttatatttttatttcttttcctttttttgaaatctactgtcatctttgtgaagttttcttattacattgcttccattttaaaaacatgtaatatgcttgttttataatttttggcattatctgtataatatatgaatcttttacagaggtgattcctcctgcccctcaacattttattagggaaattttcaaaacataatgaaaagttgaaacaattgcatgactgattttcctgactctttgttcatggaattatgcctctttgcatgtttttgtttgtttgtttgttttgttttgttttgttttgtttttaagacacagtctcactgtgtcacccaggctggagtgcagtaatgcgatcttggctcactgcagcctccacctcccaggttcaagcgattcttgtttctcattctcccaagtatctgggactacaggtgcgcaccaccatgcccggctaatttttgcattttaagtagagatggggtttccccagattgaccaggctggtctcgaacccctgacctcaagtgatccgcccactttggcctcccaaagttctgggattacaggcatgagcctctacacctggccatttttttttaaatttgattttttgtttaggcaaaattcacataatatatagttaaccattttcaagtgcatagttcagtgacatttagttcattcacagtgtggtgctgctttatttttgactcataggttattttccttggaattctaccccatagattcttgaggcctgattgaaggttgttcctctagggcagatctgtgtttgcttctaccaggagccctgccaaaccaggaccaccataaagtaaacacatggcaagttttttagatccaccttagtattgttatgtgaactgcaggcctgtgtgagggctggcttgtagttacagttcctcagaggaaaatgtttcccttctgccatctgccaaggttccagtcaggcagttttcctagcggaccctaggaatgggaatgccacatctggttttcccttactctaagggcgtggttctagaggtcccaggtctttgtagtatggaattaattagaccccccaacttggccagctataggcttgatcttctctccacctgctccttaatatcatgaatgtcaaagcttatggtcttctgggctccatagacattccctgggcaaaataagcctcagtggctcagcttacccctctctgttcccattttgacatagttttatctgctgaagattactttacttctctgtcagctcatccttgaattctaaaatatttttgatattcaatctcttatttttcagctggtgatttggttgtagtaactagtcccccacagagcctggtgtcctatgattgattttctttttttcccccctccgtgactgagctttttaagaggaaatgcatgctaggtaagagttatctgcgaccctggtgcccacgtagagccagagtcatggggatttgattcgtattttcggataagagaattttgttgacacagctgctcctctcttcccattcccttccgcctttgatctcccttcatagactgctgtgatctgcagtgacaaacacagcagacctagcattttccgctcccctaagtgcaggggccagctgagggttctttcaaaggatcaggaaattcccaggttgcatctacaagagccagaagttagaaggcaaccagctgcagacttggttatttctcagtagattcagaacccagcattgccactgtaactgcagatttgagtaaatgacttctcttctccaagctaaagtttcctttcagttaggattcatgaccttctcatgaggattaatatatgtaaggcaccaggaacttaaagtgcttaaagaacaatgattgtccttgagatgcagtgtgcagtgtgcagtgtacagcagtaaggttaggggtagtagcaggagagaatgtcaggcaggaaggccatgggtaatctcggtttggaaccaggatgtactggccgtgaggattcctggaactgtggtttcatgcattgtgtatctgggtaattgagccctgctgaggctgctgagagcctgctgatcctgtgggttgtctggctcagtgctggtcattctggagagtctttgcagaatgaggttttagttttagttccaaaggccccagttctgggatatacgaacaaagcccaggaagtggctggtgcatagaacaccagaatttattcctctatctctattaggcttgagggaggctggaaccctctgttgtagaaatctttgtccagagctgggcctgcccaggtatcctgtgctcctgggccttgagggctccctcaagtctttggggtgccttcaagtctttggggtgccttccatggctgagggtctcagtgatatccaggttgtacaaaagggagcccaggccctgggctctgatcagctcctgacagtggggaagttgtttcttctgagtctgttattctatagttggattccctgggattcaagaaagacaaaggtttgttcattctttctcaaatctcagagagaaagaaaacacagactctgtgtgtgtgtgtgtgtgtgtgtgtgtgttggggtaccaaaagcagggatggggtgaagggattcattctcaggcctttggggaccttgaggtcagtctgatgaattttgtcaacaaaattctcttatccaaaaatatcagtcaaatccccatgacttgctttttcttccttttttgctttctcaggctttctctaggagaaacctagggtataaattttgtagttgtaaaagctattatctatgtgttagtatgtctcctctccttcattgaatgcattctttcatttttaaattttttatttttatttttgtagagatggggtcctgctatgttgcccaggctggtcttaaactcctggacccaagcgatcctcccacctccacctcccaaagtgctaggatcacaggcatgagccatcacacttggcctgaatgctttcttttctgttttttattttaattaacaatgtattagtcccttctcgcatgctataaagaaatacctgagactggggattttataaagaaaagaggtttaattggctcacagctccagctccacaggctgttcaggaagcatgatgctggcatctgctccgcttctgggggtgctcaggaaacttaccatcctggtagaaggcaaaggagaagccagcacttcacctggccagagcagaaggaagcagggaaggtgcgggacacttttaaacagccagatctcgtcagaacttactatcatgagaacagcaacaagggggtggtactaagccattcatgaagtattcacccctgtgttccagtcacctcccgccaggccctccctccaacatcagggattagaaatccacatgagacttgagtggggacacagatccaaaccatatcagacacattgtaatcctagcactttggggtcatatttatggggtacaatttgatgtttcagtacatatctatgtggtataatgagccagtcagggtagttagtgtatctatcacctcatgcatttatcatttctttgtggtaagaacattcaaaagcctctcttctagctattttgtaatatacaatattttattgttaaaccatagtcaccctactgtgcaatagagcaccagaatgtattcctcctgattgtaactttgtacccactgaccaacctctcgcgttttgtacccccaccccgtctctggtaactactgttctgctctctgcttctgaacgccttctttttgctttagaagatttgaacagattgaacagatttctttttcctaaaacttcttggcttccccagggacttgttccccagttcttcccattccagtcagtaatgctatcaaagactgctatctcttttattgattgattgattgagacagagtctccctctgttgcctaggctagactacagtggcatgatcttggctcactgcaacctctgcctcccaggttcaagcgatcctcctgccttagcccccctagtagctgggattacaggcacgtgccaccatgcccggctaatttttgtatttttagtagagacagggtttcaccatcttgaccaggctggtctcaaactcctgacctcaggtgatccacccacctcggcctctcaaagtgctgggatttacaggtgtgagccaccatgcctggccaaggctgctgtctcttaagggcccctctgttctccaagaagtgtttaggtatttatcagcaaacctcttagcatttataagtttctttgagacaacatcttgcttggtcacccaggatggagtgcagtggcacaatcatgggtcacttcagcctcaacctctggggctcaaagagctcctcctgcctcagcctcccaagtagctgggactgcaggtacatgccaccttgtccggctaattttggatttttttgtagaaacgggatctcactgtgttggtcttgaactcctgggctcaagcaatcctcccaccttggcctcccaaagtgttgggatgacaagagtgagccactataccaggattagcattttttagatgcatgttcttccaccgagagtactgatggagtaggaaaaccaatccttgctggaaactttcatacctcccttcttggagctgtgatttgatgaagtggaaatgaatggttaagtggaatcacatattgcaaacttgagttttctaattagacaagaaaggaattgatgttgatttattgtgttgcagtctcagtatcagccagtatctctagctgtctgaggattttaggactggggatatcctgagatatgtagattgtatggagttacagtgtattcccaaggagtctgtgccagatggataaagtgtgtccattttgaacttgtgtagtatgtgcgcacctcgtgtgacatcgttgtgagtctggatctttctccatcagttctggtagctaaggaacaaggagagtatggttggggtcatttgtggtaacaggaacaatttagccagatgtataaattgttgagaaatgaccaggcacggtggctcatgcctgtaatcccagcactttgggaggccaaggcgggtagatcacttgaggccaggagttcaagaccagcctggccatcatggggaaactctgtctgtactaaaaatacaaaaattagccagatgtggtggcccatgcctgtggtcccagctactcaggagggtgaggcaggagaatcgcttgaacctgggagacagaggtagcagtgagcggagatggtgccactgtactccagcctgggcacccaagtgagactctgtctcaaaaacaaaaaattgttgaaaaataatgaatgactattataactgcaaaagaacctttagaaaacttctccaacctacttcctcaaaacaagaacattgtatatattatatgaggaatcatgcagccagtaaaattgctgtctatttaagaatttttggtgatgtagaaaactgattcaggatttaatttattgaatgggaaagaggaagaggcaatgagaagtttgtgtgcttaacatagggtgttccgtgtacttgcacgtacagtttcatttaattgggaaacaccacttacatggacttagtttattctctgacctgggtagataatggaagtgcccagaggctacctttgcaggagtaagcatgcccaagaaccatgtgggcacttcactctgatcacccctgtttccacaccgacccctccatgttgaaggagccagtatggcctgttttcctaatggaacttccctattgaattgctttctccattttcttttatgttgtcttaaagattttgtccatgaatttcacaaatggtgtatttatttttggtttcagggcttgaagttcaaagatgtggtcatttacttctctcaaaaggagtgggaatgcttgcactctgctcagaaggatttgtaccgagatgtaatgttggaaaattacggcaacctggtcttactgggtaactttatctgcccctccgtacaccccctgccccgccaaacacacaattggccttctggaattcttatgttcttttttctgagtttgtcccaagtgcttttcaagtacctggatgagttaatgtttcttgctcaccaaaagaatggtttgtctcttgtgaagttggaaattggctgttccagcaggcacctttatcttcattattttcatacctcccttcttggagctgtgatttgatgaagtggaaatgaatggttaagtggaatcacatattgcaaactttttttctaattagacaagaaaggaattaatgttgatttattgtggtgctctgaccctcactccttcttctgacccttaatctacctgctcctctttcttggtaattagggactgatttttaattctgacacccacaacaaaaccttgttccctttgtttttgagcagggctttctgatactaagccaaatgtgatctccttattggagcagaagaaagagccctggatggttaagaggaaggagacaaaagaatggtgtccaggtgagtgacgatgaactggaatggggaggccatagcaggtggtcacttagctcatctgtgagaaggcagcacttcagggattttggtaggaaagctgcctaaaaaggcttgagatctggggaagaaagtaaggatgttgtaatcccagcagtttgggaggctgaggcgggcagatcacaaggtcaggagttcgagaccagcctgaccaacatggtgaaaccccgtctctactaaaaatacaaaaaaattagccaggcctggtggtgcgtgcctgtaatcccacctactcaggaggctgaggcaggagaatcacttgaacctgggaggcagaggttgcagtgagccaagattgtaccactacactccagcctgggcaacagagcaagactccgtctcaaaaaaaaaaaaaaaaaaaaggaggccaaggcaggcggattacgaggtcaggagttcaagaccaacctggccaacatggtgaaaccccatctctactaaaaatacaaaaattagctgggcatggtggcaggtgcctgtagtcccagctacttgggaggctgaagcaggagaattgcttgatcccaggaggcagaggttgcagtgagccaagatcgcgccactgcacttcagcctgggtgacaaagcgagactccatcttgaaaaaaaaagaaagtaaagcatgtttcagctccatttactaggctctcttgctcacctcctataatacctcccccctcatttcagagaggaagtaccctctttctttccctgtgacaaccattttacttgcattttgggtccagttttgtcctgactttttaaaacagttttattgagatatcataaaattcatccatttaaagttcagtaatttttagtcagttcacaaccatcacaacagtctaattgtagaacatttgtatcactcaaaatgaaacgccatacccattagcagtcactccccaaatccagccctaagcaactactgatcactttctgtctacatagatgtgcctgttctggacattttatattaatgatatcacacaacatataatttatgactggcttttttcacttaccagaatgttttcaaagttcatccatagtgtaacatataccagtgcctcattcttttatattgccaaatagtattccatggtatagatattaccattctgctcattcatcagttggtagacatttgggttgtttctacttttaggctattttgtatgactaaagctgctatgaacatttgtatataggttcccttcttttcttcgtttgttgagtatttttgtcatgaaaggattttagaatactttttaccattactttttctgcatctattaagacatctgtagtttatgtcctttgttgtatgaatatgtttgattacattgataacttttggatgttgaacctaccttgcatttgtaggataaattttacctggatgtggtatataatcctttatgctgttggatctggtttggtcttttttgttgaagatactggtctgtagttttcttgtgatatctttgctttgtctggttggtatcagggtaatacaggcctcagaattagaaaatgtttcttcgtcttctgtctttttgaagtgttcatggaggatttatattaagttttctttaatgttgggtaagtgaggccatttgctcctcggcttttctttatgggaagatttttttgctctaattcagtctctttatttggtataggtctattcaggtattctatttcctcttgagtcaattttggtagttttgggtctttttaggaatttgtccattttgtctaagttatctaacttattggcatatagttattcgtaggagttccttataaccctttttatttctataaggtcagtggtgatatctcctatttcattcctgatgttagtattttgagacttctctctttttttgttggtcaatctagccaaagatttgccaattctgttgatcttttccaaagaccaacttttggtctcattgattttctctgttgtttttctattctctattttgttcattgctgctgtgatcttttattatttccctccttctggaagctttatgtttttgtttattctttattatctggttccttaagatatacagttagattgttgatttgagatatctctgtttttttttctttttttttttaatataggtgtttttagctgtaaatttccctttaagccctgctttagctgcatttcataagttttggtatgttgacttttcatttatctcaaaatattttttaattttcttcatgatttctttaacacgttggttatttaggagtatgttatttaattttcacgtttgtgaatttcccagatttccttctgctgttgatatctaagttcattccattgtagttgcaaaacatattttgtgtgatttcaatcctcttacatttattgagggctgttttatggcttaatatatggtctaacctgaaaaatgttccatacatgcttgagaaaaatgtgtattctcctgttgttgagtggaatgttctacaaatgttttcttaggtttaattggtttatagtgtttttcaagcaatctgtttccttgttgatcttctgcctagctattctatccattattgaaagtaaagtattgaagtcttcaatttgttcaattgtttgtggctctctttaattcttgtgttacatattttgggcctgtgttattaggtgtatatgtacttacaactgttacagttttctgactatcattatattctcttatcattataaaatatccttttttctgatttgtgtgttgttgttgtttttttctgagatggagtctagtgttgttgcccaggctggagtgcagtagcacaatctctgctcactgcaacctccacctcccaggttgatgtgattctcctgcctcagcctcccgagtagctaggattacaggtgcccgccaccacacccagctaatttttgtttcactgtgttggccaggctggtcttgaactcctgacctcgagatctgccggcctcagcctcccaaagttctgggattacaagcgtgacccaccgcgcccggccaaaatatccttttttctcactggttacaatttttgtcttaaagtttattttgtctggtattagtaatgctattttacctcatttttggttactctttgcatggtatatctttttccattctttcatttcaactatttgtgtccttgaatctaaagtttgtctcgggggctgggcatggtgacttacacttgtaatcccagcactttggaaggccgaggtgggcagatcaattgaggtcaggtgtttgagaccagtctggccaacatggcgaaaccctgtatctattaaaaatacaaaaaattagccaagcatggtggcccgtgcctgtagtcacagctactcaggaggctgaggcatgagaatcacttgaacccagtgagtggaggttgcaatgagctgagatcacgtcattgcactccagcctgggtgccagagtgagactgtgtctcaaaaacaaacaaacaagcaaaaaacagtgtgtctctggtagattgcatatacttggatcacttttttttaatccatcctgccaacctcttcttgtagtgcttaacaaactctgtagtgtttaatatgtttacatttaatacactgatggggtaggatttacaattggtattgtggtatttgttttctatttgtgttgttattgttttattcctctattcttccattactaccttctgttatattacatgaatattttctagagtaccatttttgttcctatattgtttcgtatacagtagtctttgaaattattttcttagtggtcgccttcaagattataattagcatttcaacttaaaacaatctagtttggattaatactagcttaactttaatcttacataaatactttgctccaaaatacttctgttcccacctctcttctttgtactattattgtcatacaaattacatatttatacattataagccaatattggcaggataataaccccctcaaagatgtctatatccgaatctctgaaacttgtgaacgtgttactcttacatggtaagggggaattcaggttgcaaatctgctcaacttcaattagggagaggatcttaggttatccaagtgggcccagtgtaatcacaagggtctttaaatgtatcagagatgtggctgggtgcagcggctcacacctgtaatcccaacactttgggaggctaaggtgggcagatcgcttgagcccaaaagctcctcgttttctcatttttcacttccctttttttttgtaattgcagtgtaaagaattgcttattaactatttttattttgtcatttctactttcaggacttttctttgtcctgcaatgtgaaaatacctcctattttctttcttattattttgcagattgggagtttggaagagaaaccaagaatttatctccaaaggaaaacatttatgaaattagatcaccacaacaggagaaggccagagttatcagagaaatcagatgccaggtggagagacaacagggtcatcaggagggacatttcagaccagctgtaataccatttacttccatgcagtgcacagcccatagagaatatcagtggcttcatactggagagaaatcctgtgaatgcaggaaatgtaagaatgcttttaggtaccagtcatgtcctattcaacatgaaataattcataataaggaaaaagaacctgaatgtggagaatgtaggaaaatctttaatagtggatcagacttgattaagcatcagacgcttcatgaaagcaaaaaacatagtgaaaataacaaatgtgcctttaatcatgattctggaattactcaacctcagagcattaatactggagagaaacctcataaatgtaaggaatgtgggaaagcctttcgttccagctcacaaattagtcagcatcagaggatgcatcttggtgagaaaccctataagtgtagggagtgtgggaaagcctttccatccactgcacagcttaatctacatcagaggatccatactgatgagaaatactatgaaagtaaggcgtgtgggaaggcctttacccgtccctcacacctttttcgacatcaaagaatccatacgggtgagaaaccccataaatgtaaggaatgtggaaaggcttttcgttatgacacacagctgagccttcatcagataatccatactggtgaaagacgctatgaatgcagggagtgtggaaaggtgtacagttgtgcctcacagctgagtctacatcaaagaattcatactggtgagaaaccccatgaatgtaaggaatgtgggaaagcctttatctctgattcacatcttattcgacatcagagtgtccatactggggagaaaccctgtaagtgtaaggaatgtgggaagtcctttcgtcgtggctcagaacttacccgacatcagagagctcatactggtgaaaaaccctatgagtgtaaggaatgtgaaaaggcctttacttgtagcacagaacttgttcgacatcaaaaagttcacactggggagagaccccataagtgtaaggaatgtgggaaggctttcattcgaaggtcagaactcacacatcatgagagaagtcacactggtgagaaaccctacgagtgtaaggagtgtgggaagccctttggtggtggctcagaacttagttgacaccagaaaattcatactggtgagaaaccatatgaatgtcagcagtgtggaaaggccttcattcgggcctcacaccttagtcaacatcaaagaattcattcaggacagaggagtgaatgaagaaatgagggatggctcagaatttgattgacatgagaaagttcatactgatttggaaaaaaaaacttatgattctaagtgtgagacaccttataaatgttaggaattagcagggatttatttatgtttcagaatttattacacatcatgatacaactggtgaaaaattgaagacctccatgaatgtaaagaaagtagggaggcctttttggtggctcagaacgaagtcaacctcagggaattcaaatgggggagaggagggcagtgaatatgctgagaggagttaatcattcagacctttatcagcagcagagtcattagcccttaggggaaatcagatgattcaaaatataaatgcaggccgggcccggtggctcccgcctgtaatcccagaactttgggaggctgaggtgggtggatcacaaggtcaggagatagagaccatcctggccaacatggtgaaaccccgtctgtattaaaatgcaaaaaattagctgggcatggtggtgcgcgtgtgtaatcccagctacttgggaggctgaggcaggggaatcacttgaacctgggaggcagaggttgcagtgagctaagactgacccactgcattccagcctggcgacagagcaagactccatctcaaaaaaaaaaaaaattattattatacacacacacacacacacacacacacgctgggcgcagtggctcacacctgtaatcccagaactttgggaggccgaggtgagtggattgcttgagtcctggagtttgagaccaacatgggcaacatggtgaaacactgtctctacaaaaaatatttaaaaaattagccaggtgtggtggtgcatgcctgtaatcccagctacttgggaggctgaggtaggagaattgcttaagcccaggagacagaggttgcagtgagccaagatcatgccattgcacagcagcctgggtgacagagcgagactcttgtctcaaaaaaaaaaaacaaaaaaaaaacacaaaaaaacggggccgggcacggtgcctcacgcctgtaatcacagcactttgggaagctgaggcgggtggatcacttgaggccaggagtttgagaccagcttgaccaacatggtgaaaccctgtctctactaaaaatacagaattagccaggcatggtggcgcacagctgtaataccagcaacttgggaggctgaggcatgagaatctcttgaacccgggaggcggaggttgcagtgagctgagatcgtgccattgcactccagcttgggcaacaagagtgaaactccatctccaaaaaaaaaaaaaaaagaaagaaaatgtaaatgccatatatatgggacaccaatttgctttagctaacaaagtattcatctgacaatacttgaggaaggctagagtagtatttaaaatgcagcagattctttcatcccacataaatcttgttaaatattcacgagctaattctctaaaattaactggagctgaatcaatgtggggaagaatttaaccaatgtttagtttttactcacccttatcattattactcatttcttttagggtgaatttattaactacatctacattttctcatttataaaatagtactgttagcaccatatttcttagctgcattgtgggggttaaatacatttatattatttaaagcagtgtctgtctagtattgaaagtgtgctaaatgaaggcgtttattgtttttctttgttattttcttaatcatgcattattagacatgagaggaaggacttatatttgcagtgactataggaacatattgcatcatctctttttctttattgaaggttaggtaattccttctggagaaaaatttaatactgtgaagcctttatttatagctcacccttttgccttactaggcaaataatgtgaagaaacccagtagaataaaagtgggttgctgtgaagtcaggcggaagatttagatatttatcaaaacttttcaaaaggctgggcacagtagctcaagcctgtaatcccaggaatttaggaggccgaggcgggcagatcacttgaggccaggagttcgagaccagcctggccaatgtggcgaaaccccatctctactaaaaatacaaaaaataagccaggcacgatggcgtgcatctgtagtcccagctacttgggaggctgaggcaggagaatcacttgaacccaagaggcggaggttgcagaattaaaaaaataatacagccctagccaaaatgtatttctccactagaaaattttaaagctacctgtataaataatttttatattaaaaaggatatcggcctggtgaggtggctcacgcctgtattcccaacactttgggaggccaaggcgggtggatcatgaggtcaggagatcaaaaccatccttgccaacatggtgaaaccccgtctttactaaaaatacaaaacttagctgggcgtggtggctcacgcctgtagtcccagtagtcaggaggctgaggcaggagaacagcttgaacccggagtgggaggttgtagtgagccaagatcgcaccactgcactccatcctaggcgacagagtgagactccgtctcggctgggcgcggtggcttacgcctgtaatcctagcactttgggaagccgaggtgggtggatcatgaggtcaggagattgagaccatcctggctaacaaggtgaaacctcatctctactaaaaatacaaaaaattagccaggcctgtggtgggcgactgtaatcccagctactcgggaggctgaggcagaagaatcggctgaaccggggaggcagaggttgcagtgagctgagatcgcgccactgcactccagcctgggtgacagagcaagactctgtctcagaaaaaaaaaaaaagatgtcaaggcaggccttattaggaatgaatgacaaagggaacactacatatggaaatttatagggtgtgaacaaagctatagtctcaggaaaattattttaatatgtatagaaaacagggccagttaaggactaggattcattccgacttcaccctgtgtgctcctgttcctagcaggttctcagtaaatatttgatcataggaatgtgtgaatgatccaaggagtgagagagtgaatgaataagcattcaacccttggatgtagaaaagctctaggaaaattaatggaaggcaaaaacaaaacacaaaactttgaaatgaaaagcattgcaccctatgaagaagaaactcaagcatagttgcctgttcattggtgttaaccactctccttttggcaggattgcctgctgctcttctgaatctgtaaatgccagatatttgatctcctagcttgccctgcatctggtcacacatataatagccctggatacggaagatctgtgcaaaagtctgcaaatgggcttcagttaaattttgtttcctaacaaaatgggagaaaatggtcttcttcaatacaagatgcatgtctgtatgtcagcgtgatacctggaattgtggccattttgcaagcagagaatcaagagtctgagactggcacagaataggttggaattatgtgtgtccttgacatttttgttttgttttgttttgttttgtttttgtttttcagacggagtcttactctgtcacccaggctgtattgcagtgatgggatctcagctcactgcaacctccacctcccgggttcaaacgattctcctgcctcggcctcccaagtaactgggactacaggcgtgcgccaccatgcccagctaatttttatatttttagtagagatgaggtttcactatgttgaccaggctggtctctaacttctgacctcatgatctgcccgccttagcctcatgctgggattacaagcatgagccaccactcccagccaacattgttgatatgatgaaacaatgaagaactgccctttccctggacttggtgcgaaataagaaactgcaggagtatgttgtaagtttatttttatttttatttatttatttatttgagacagagtcttgccctgtcgcccagactggagtgcagtggcacaatctcgactcactgcaacctccacctcccaggttcaagcgattcttgttcctcagcctcctgagtagctgagactacaggcgcctaccatcacgcccagctaatttttttctatttttggtagagacagggtttcaccacgttgcccaggcagatcttgagctcctggcctcaagtcatcagcccgcctcagactcccaaagtgctaggattataggcgtgagccaccgtgcccacctgcatatgttgtaagtttatactccactttttacaatatatctgaggcctggaaagttatttttaaagacatttttatatatacacacattcaactttcgtaaagtttatattcagctttttatagtacatctgacattgtagaaaagcattttcttatatatagttgaaatatatattcaactttgatttagtaaagtatatgaaaaacataatttacattcagcattttatagtgtatgtttatattcagctttttatagtatatgtgaaatcctagaaaagtattattttcctgaataagaaccaggaagaaactgattaaagagctataccacataatttctctagtactagattatcttacagtcttctacctcttcaagatacaaaagtcatggctgtgaggctatcattacccttttaccaaagttggaaaaggacagcatccaaaataagtcagctataaaaaaaagtaaagtcggccgggtgcggtggctcatgcctgtaatcccagcactttgggaggctgaggcaggcggatcacttgaggtcgggagttcgagaccagcttggtcaacatgatgaaaccccttctctactaaaaatacaaaaactagccaggcgagatagcacgtgcctgcaatcccagttagtcaggaggctgaggcacgagactagcttgaacccaggagacagaggttgtagtgagctgagatcgcaccactgcattccagcctgggcgccagggcaagactctctcagggaaaaaaaaaaaaaaaaaaaaaaaacaaaaacctgatgtgtatgcttccatgctttgcccacactaaagaagcatacccacagctagatttgttttggtaccataggaggtttcaggttggggagagtagtttgaatgacatcgtgcatacacattgaagtgtcatctcctctcctcacttggtaacataccagggacatccttcaaattaatacctgtagatcaaactagcttgaaattcttacataatggagtagttcccccttatccctggttttacagtatattgttttaattgttctattattggctattagttaacttataagttttatcataggtatctatgaataggaaaaaagcatagtatatgtagggtacagtactctatacagtttcaggcatctactggggatcgtggaacatgtaccctgcagataaaggactattctatagacaaaccatatgcagcccatttttccactaatgaaagttcagattggggccaggcatggtgctcatgcctgcaatcccagcactttgggaggctgagccaggtggatggcttgagcccaggaatttgagatcagcctgggcaacatggtgaaaccctgtctctataaaaagtaaaaaaaaaaaaaaaaaaaaagtcaagtgtggtggtgagcacctgtagtctcagctacttgggaggttcagggtggagaatagcttgggcccaggaggttcaggctgcagtgagccaagattgcaccactgcacaccagcctgggtgacagggtgagacctgtctcaagaaacaaaaaattcaaattattttaccaataattatacaccaaacagttttgttgtacatatattgttgcatgttgtacttttatatcaataaagtaggtggagtcctaccagttgaattccttgcctacaacatagtggatttaaaatatattcattaatgccttattattgtctgaaatcattaatcttaatgggaatttatgtccatttcctgacaaattcaaccaggactgaacttttttttatgttgggtgaaggaaaagaaaaagtgccttcaattttcttttcttttctttttttttttgagacagagtctcactctcggcaggctggattgcagtggtgcaatctcagctcactgcaacctctgcctccctggttggagcgattctcctgcctcagcctcctgagtagctgagactacaggtgcccaccaccacacccagctaatttttgtatttttagtagagacaggagtttcaccatgttggccaggatggtctcaatctcttgacctcgtgatccacccgcctcagcctcccaaagtgctgggattacaagcgtgagccaccgggcctggcctgcattttcttaactgccagtgagattgagcatctaccatgtctaagggtcattcgagttctgtttctgtggattgcttatttttatctcttccttttgtttacattggagtagtttttaaagcaatctgtggaaactttgctaaggagattgtattgtcatatgctctgcagtttagcctgcatcttttgccatcgtttatggcaaacagagttaacatatttttctgtgaagagccagatagtaaacatgcaaggctttgtaagccatacagtctctactctgtctttgtagtgtggaagcgcttaatacataagccaggtgttctcaaacaggggccatttcgtttctcatacctacaccccagtaggcatttggcaatgtccagagtcatttttggttttcagtatgaagggtgggtgctgctggcgtctggtgagcagaggccagggatcctgctaagcgtcctacaatgcatagtacaactgcccccaccccccaaaaaaagtctcatccagaatgtcagtagttctgaggttgagaaattctacctataagcaaatggacattgttgtgttccaataaaactttatttacaaaaaataatcagaaggccacatttggcctgtgagctatagtttgcttatctctattttaaatagctttttgctatatgataatatagttttctgtatttgttcctgaattgtctcattcaccccaaatatttttccaaattttcttctattttatgcctttaaacctttactaaatacaaataatacacagaaacaatagcccctgtgtaactaccacctaataattaagcatgttgttttattgttttgattaaaaatttataaaagaaataaatcatttcagaaaaaaaagtgtagtcttctctttttctctttccagtcctgctctttgccctgtgtctgcacagcaataacttagtgcactaatatctgtaaaaccagcacgtatccaatgtacaaggacatgatacatactattatgtgcttctaagtaacacaaatggtgatacatctttctgcaatttcattaacaatatgtgggatccaaaaccattgaaaaatactgatctaattcttttatctgctgtgttgccttcttatttatttatttattttttgagacggagtctcatctcactctgtcacctaggctgagtgcagtggcgccatcttggctcactgcaagctccacctcccgggtttacgccattctcctgcctcagcctcccgagtagctgggactacacgcgtccgccaccacgcccggctaatttttttgtatttttagtacagacggggtttcactgtgttagccacgatggtctcaatctcctgacctcgtgatccgcccaccttggcctcccaaagtgctgggattacaggcatgagacaccgcgcccggcctgtgttgcagttttatacaatttattcactgaagtccctttattagagaaaaacagttgtaaatttaaaaaactatatattttaagcactcaggatttaataaaggatttttgtaatttgaagaatgttcagtagagccaagaaagcttgtgggctttacaacctagaaaaaagttgtaagcagagaggcttagatccactacggtactgttcaaggaaaagtgtcagggctactactacccactgctcatcacctagtggttgagggcctggatgctgcaaacttccacagtgagcagttctaagcaaaccccaaaggccgaggaagctgaggggccaaaggaagaggctgaaaaatctagtttcttggaaacatttttttgtttggtttgggtttttttgttgttgttgtttgtttgtttgagatagtctcactctatcgcccaggctggagtgcagtggtgccatctcggttaagcaattctcctgctgaattcagcctctcgagtcgctgggattataggcgtgtgccacctggctatatttttgaatttttagtagagatgggttgtggggaaaagcaagagagatcagattgttactgtgtctgtgtagaaagaagtagacataggagactccattttgttctgtactaagaaaaattcttttgccttgagattctgttaatctatgaccttacccccaaccccgtgctctctgaaacgtgctgtgtcaaactcagggttaaatggattaagggctgtgcaggatgtgctttgttaaacaaatacttgaaggcagcatgctcgttaagagtcatcaccactccctaatctcaagtacccagagacacaacacactacagaaggccgcagggacctctgcctaggaaagccaggtattgtccaaggtttctccccatgtgatagtctgaaatatggcctcgtgggaagggaaagacctgaccgtcccccagcctgacacccgtaaagggtctgtgctgaggagaattagtataagaggaaggaatgcctcttgcagttgagacaagaggaaggcatctgtctcctgcctgtccctgggcaatggaatgtcttggtataaaaccggattgtacgttccatctactcagatagggaaaaaccgccttaaggctggaggtgggacatgcgggcagcagtactgctttgtaaagcattgagatgtttatgtgtatgcatatctaaaagcatagcacttgattctttaccttgtctatgatgcaaagacctttgttcacgtgtttgtctgctgaccctctccccactattgtcttgtgaccctgacacatccccctctcagagaaacacccaataatgatcaataaatactaagggaactcagaggctggcgggatcctccatatgctgaacgctggttccccgggtccccttatttctttctctatactttgtgtctttttcttttccaagtctctcgttccaccttacaagaaatacccacaggtgtggaggggcaacccaccccttcaatgggttttcaccatgttggccaggctggtctccaactcctgctctcaggtgatccgcccacctcggcctcccaaagtgctgggatgacaggtgtgagccaccacacccagcatctcagaaccatttaataaaaactaggaacagaagtcatgtcgcatgcagctgcaagatggtggatccctgcacaattaccccaaagttcctggctttatataccatagggaatttgcctaagggcgggactataataagtatggttcgtgagcaaacatcaaggttgtttgacctaagggggagaatttaaggtaagtacataaaagtacatttaaggtgttcctggaactggggctaatcaagagtcaacatggtagattagcatccaagatggagttgctttaacccccggcggagacccaagcctgcgccttgaagctccttctccaccggtagaagtcgactcaaggaggtcgtgaggacaggactcctgggggtcccgctctggggcacccgtagccctctcttccacagcgccctcctactggactcccgctgtagccaccgccgtgactgcagcaagtgcaccccctcccccaaccccgaggccgccgcgccgccaccgttgtttaaagaagcctctgcctgacttccgggagcagagcgctggacggacaagccaatgcgcatgcgcgaggcgccggctgtttccccgttcacaatgacccccacggttgcctaagaaaccagtccctgaggcttgggaaagcaggagccctccgcggcagtgcgtcggtgtcgaggctccgaggctccggcctcacctctccaggaggtcgacagaacgacaggacgttctccgaatgccaggagtcgcagagggcagagcaggatgaagaaaccacaggcggagtctaggggaagcagtacggcgtccctgcctcaggcctgcccggacggtgtgcgggtgagtctccccaaaagtcgtgcccctgtcaattcgaggacaggtctgcctgtgtgcctgtaggctactctctcacccgagggtcgttctcacagagagcagaaccccgcagcctcaggagttgcctggggcgggcggggggggatgtttgtgtaccactgctgtgtgtgtgtgtagtgtgtgtgtgtctcactttcttctctctctctctccctctgtttctttctctgtgtgtgtgtccgtgtgagtgtgttgtcacgaatgtgccctgtgcgccaaagggcaatttcttgcatgtcggcctgtctttggtgagcctctttctgcatctctgcctgggtcatgtggagatgcttcggacccagaggaattgaaatctcatccccagcctgagtggcagcttttctaggatcaagaccacacctcagccaaggacaaaagcatcagaagagctcattgtcctgagggaggggagcagaccgacgtcaaagatggttttaagtccgcgagactcttctctgacaaatgaagccacaccacgacacaggcttaaagaagaagccgggaacaggacatggcaaggatccctgtcactggaacactggcctttctggacaagtcacccgtttggcactcctccccgggtgcccgttgcggtggcactgtgctgtatcctgcctgggctctggcctctgctctgtcctccctcttgctgtgtctcccgtttctgaggggtgcagatgcttcttggtctgcctcaatgtcttcaacaaagaacactttccagtccatcagggagaaacttcaaggagatccatgtcatgattgtttccctctgcaaacttgtttctggtggattgggcacgtgtgaagatcctggagctctgggcatccatacctgtctcagacagggaagctcccttggtctccatgtttcacctgatggctgcgtagtttccctacaatgaatggtaggcgaccgtggctggccttggcttcaagagaggcggtgtcacatttcctctgcatttcctgtctcattcttaagggacatctgcttcctctgctcctgggtggactgcctcccagaactgaatcttttggcagccaataatgtcagggagccaaagggactgggctggggctgggtgcatgggaggttgcgttagggctacctaggcggtggagggatggaggtggagtgatctttacagaaacctctccgctcctccagcaggctccccaaaatgtggcttggacttacgcacagggcctcttctggttcccagctgtgctttgcttttccttggcattgttggggaggtcacctgtgccccccttccaccgggcacatgcctggacaccagtgttcgtctcgccatcgccccatatggcctcggtgacacacactcaccccatctgctctgggggacgccagtgccacgtttggtcacattggctccacctcggactcacccctgttcttgtttgcatgtctcctggaaagcggtggcggcacacagcagccccaggactttggcaagcggggcaggccactgcacctcccagggaggagggaggcagagggctcatgtttcagtgaattttcagctgacaccatgccttcaggcccatgggatctttctgtgccccagcgaggccctgcctgcctcaccagatgaggtgagcccatccctggtcacctggtgggatccaaaatcggatctgaagaggagtactgagaccccagcaggcgccctgaacctcctcttccactggtagaagttggctcaaggaggccctgaggacaggactcctgcgagtccggccctagggcgcccgcagcccccactccctcgccgccccctacttgatcccggattcagccaccaccgcgctgcagcaggagcccctactgccgccgccattgttcgagggggcctcagcctgagttccaggagcagagcacgagtcggcctaggcaatgcgcatgcccgaggcgcgagaggattatcccgtcacagtgattcccacagttgcctgagaaaccagtccctgaggcttggcaaagcaggagccctccgtggcagtgcttgggtgtccgggctccgagactccggcctgacctctccatggggtcgaaaggacggtctctggatgccaggagtcgcggagggcggaccagcatgaggaaaccattggcggaaaatggcagaagcagtgcggcatcccagcctcaactgccgggacggtgttcaagtgagtctccccaaaagtcatgccccccgtgatctcgacgacatgtctgcttgtgtgcccgtgggctgctctctcacttgagaatcgttctcgcaaagagcagaaccccgcagcctcaggggttgcctggggctatgtgtttctgtgccactgctctatgtctgtgtgtgtgtgtctcccattctctcttctctctctgtcactctgtttctctctctctgtctgtgagtgtgtgtgccggtgtgcgtgtgtgtgttgaatgaatgtgccctgtgcatcaaaaagcgatttcttgcatatcggcctgtctttggtgcgcctcttgctgcgtctctgcctgggacatgttgccggttgtcaatcggtttcgcggcagttccactttgggtttctaaaggcctcgacgacgtgaggagaggcgtcggtcctggaggaactgaaatttcatctccatcctgagcggcctcttttctaggatcaagacgaccacactccagccaaggacaaaagcctcacaggagctcactgtcctgcaggaggggagcagacaaacgtcaaagaagatggttctatctcctcacggctcttctctgaaaaatgaagccacaccacgacacaatcttcaagaagctgggaatgggacatggcaaaaacccctggcctctctggacaagtcacctgtttggcactcctcccctcagcctgtggcggtggcactgtgctgtatcctgcctgggctctcgcctctgctctatcctccctcttgctctgtctgccctgtttctgaggggcctagatgcttcttgttctggttcaatgtcttcaacaaagatcacttcccagtccaacagggagaaagtggtgatccgtgtcatgattgtttctctctccaaacccgtttctggtggattgggcaggtttgatgatcctggagctctgggcatccatacctgtctcagacagggaagctcccttggtctccatgtttcatgggatggctgcgtggctggccttggcttctaggaaaggcggtgtcgcgtttcctcttcacttcatgtttcattcttgagggacatcctcttctgagctcctgggtggactgcctcccagaactgaatcttttggctgccatgaatgtcagggagccaaagggattgggctggggctgggtgcatgggaggttgtgtcggggctacctaggcattggagaggtgggggtgaagtgaactttgcagaaacctctccgctcctccagcaggtgtagcaaaatgtggcttggattcacgcacaggccctctcctggttcccaggtgtgctttgcttttccttgacgttgttggggaggtcacctgtgccccccttccaccaggcacatacctggacaccattgttcgtctcgccatcgccccatatggccttggtgacacacactcaccccatctgttctgggggacgccagtgccacgtgtggtcgcattggctccaccttggactcgcccctgttcctgtttgcacgtgtactagaaagcggtgtcttcttgcaggagccccagggctttggaagcggaacaggccactgctcctcccaggggcgagggaggcagagggctcatgtgtcagtgaattttcagccgacaccacgccttgaggctcatggatctttctgtgccccagcgaggccctgcccgcctcacagatgaggtgagctcatccctgcttacttggtgagatccaaaatctgaagaggagtcctgagaccctagcaggcgccctgaagctcctcctccaccggtagaagtcggcacaaggaggtcttgaggacaggactcctggtggtccagccctggggcgcccgcagtcgcctctctcaacgaagcccgctcctcgaccttggatccaggtgccctcctaccgccgcgccgccgccattatttaaaggggccgcagcctgacttccaggagcggagcgcgagtcggcctagctaatgcgcatgcgtgaggcgcgaacagattctcgtcacagtgattcccatggttgcctaagaaaccagtccctgaggcttggcaaagcaggagccctacattgcagtgcttgggtgtcggggccctgaggctccggcctgacctctccagggtgtcaacaggatggtctgcggatgccaagagtggtggaggtccgaccaggatgatgaagccacaggcggagtctgggggaagcagctcggcatcccagcttcaggcctgccgggacggcgttcgagtgagtctcccagaaagtcgtgcacccccgtgacctcgaggacaggtctgcctgtgtgcccgtgggctgctctctcacccgagagtcgttcttctggagagcagagccccgcagcctcaggggttgcctgggggggtgtgcttctgtgccactgctatatgtctctgtgtgtgtgtgtgtgtgtgtgtgtgtgtgtgtgtgtgtgtgtgtgtctcccattctctcttccatctctgtctctgtttctgtctctttcttactttctttgtctgtgcgcccgtttgcgtgtgtgtgtgttgggacgaaaatgtcttgtgcaccggagtgctgtttctttcttgtaagcctgtctttgttgagcctctttttgcgtcttttactgggtcttgcggcccattgtcagttttccctgccgttccactttgcattttgtgaaagcctcggcaacatggggagcatcgtgggtcccgcaggagttgaattctcctccccatcctgataggcctcttgtccaagatcaagacgaccaccccacacttaagcacattttttaaaggggtcgcagcctgatgtttaggagccgggcccatgtagacctggctaatgcaccttactcgcctctcactgcctgtcacttcgtccacagcagcccccgctcactattttttaaaggggccactgacgggattacaggagccaggcgcctgtcggccttgccaatgtgcatgctcgtggcgtgtgcaggttctcacgtcttaatgatcccctccatcgtctggggaatgggtccctgaggcttgccgatcacaatcactccgtggcagtgcatccgtgtcaaagcttttgcctgacctctcaacgtggttgacatgattgtctctggatgcccggatttgaggaggtcaccgaccaggatgaaaaaacctcatgcagagtcacggagaagcagcgcgggatcccagcttcaggggacagatggaatctccggactcccatttggatctgattttggatcccacccattgagcaggaatggggttacaatctggtgaggcggggagggcctctctggggcacagaacggtcccacggacctcaagccatggtgtcagcttaaagttcattgactcatcagcccactgcctcccttctccttggacggagcaatggccttctctggtttccaaaatccagggactcctgtatcctgacactgctttctgggaccagtgccaacagggccaggggtgagtttgaggtggagcaaatgcgaccacacgtggcactggcgtcccctatgagcagatgtagtgagcgtgtatctccaaggtcgtttggggtgatgtggagactgacagtgatgtcctggcatgcgctcagggggctatggggaccttcggaagaaagccaaggaaaagcaaatcacacctgggaaccaggagagggcctgtgccggagaacaagcccattcagggaggcctactggaggaggcgagaggtttctgcaaagtacccttcacccccacccctccattgagtaggtacttctcaagctgtctttccttcacccagccaaaacggaaaatcgttcctgcctttttaggacagcagtgctgagcagcaggattccctgagctttgagaccaggacggtgccctgggaggcccaggtcgaagggaggcagtgagctcatgaaacagggaattttcagctgactccctcccctgggatctcagctgttactgtgccccagcgacccccttcacacctcaccagactgaataaccagccccatgggacccgatttctgcccataccttccaatccggaatcggagcagaagagcagtcccgagtgcccacctcacggtctgaagcgcctcctcctccaccgggatccgaacacgaagtcggcttaaggaggccctgaggtcaggactcttagggtcctgcgctgcttgtcgcaagcagcctcctcccccaagccgccgccggtccatctctagcattttcctggggctgccgcctgacagccctgacattgcagcgcgcgcgagccgaccacgacaatgcgcatgcaccaaacgcgaggcaccagggcaagctctgagccagggctggcctcccagggaccaccaccattgcctgggcacgggtcccagaggcttggcagatcaggagccctctgtggcagtgtgtagagttgggctgatgtctctcctctctgagggatcagcacggtgatcccacaatccttggagactggcagggccgaactaggctgaagaaacgtcaagcagggccccaagaatgcaccacaggatccctaaggatccctatgatgtatcaggcctgcctagatagtttaggggtgaatctccttgaaagtcgtccccccgggatttggacatacggcctgcctatgtgcccgagggctgctctctccccggaggggcttcctggcagagagcagaaccacgcagcctcaggagctgcctggctgtgtgtttctgtgcgagtgctggatgtctctgtgtgtgtttctttctgtgtgtgtgtggtttcttgtgaaacaaatgtgactcgtgcgctggagcgcggtttctctcaagtccacctaccttctgatgctcctcactctgtggctccgcttgggctgcggggccccacgtcctttgttttgcttgtagttcctgaagcctcggagaagtggggggctggctccaacccacaggggtccaaatcatctccccaccccggggagccactcttctagaaagaagatgagcacaacacacccaagaacagacgcctcctaggggcccatagtcctgtggcacatccagggctggaccctagctgtcctgtcctcaggatccccttgagcccacttcaaattccgttgctggcagggcaggagcttaaggatgtcagatgggcactcaatcttctttcagttccattccgggtcaaaaagaaatgatgtgtgtagaaataaggtgagacaggggtgaggatacagtctgatgaggtggggaggaggtcccacaactacaccagcaggacaggtgcagatagatgtcaaagaagctggttccaactcattctccccttcctcttcactgcataacctgtccacaccatggcctggtgctggtggaagaagacatgaatgtgaggagaatatttggactgcaaactgtggcctttctggccagcttccaggttgggccctcattcccggagccacatgcgagtgggatggattgatcctgcgcgggctctggcctcttctctgtcctctcttttcctgccttccatgtttctcatgggcctagggtttccttggtctggctctacattctctacaacaaacttttcccagttagttgaggatgacctttctgaagatccatgtcatgagtgtttcctcctcaacacccacatttcctaatgactgggtagctgtgataattcttgaaccgtgggtgctcgtagctcccaccaacagggaaacttttggtcctcctattccgtcagatgactgcatgattcccataggatgagaggtagtcagccatggctggcctttgccttctaatctaggctgtgtttcatttcctctgcacatcctttcttattgttgagtgatctcccatttctctattcctgactggaactgcctctcagcacggaaccattggctgttaggaatttcacagagcaaaagggactggcagttgactgggtgcaggccaggtggtgagtagtgatccggtgtggggtttggggtgttttgcactttgcacctcttggctcctctggctggaatccctgaacggggcttggactctagcacaggcccctcctgtggtcccagttgtgctttgcttgtccttccctttcttggggatcctcattgcccattgggagcatgcccggacatccttctgaggcttggattcaccccatatggcctttgagacacactctcaaccttatctgtccccatggattgccagttccaggtgtggccaccttggctccactttcagcttgcctttgtcctcgttcccgttgctactggacagcagtgctgaggagaagcaggagcttctggcagccagacaggcatgtttgctgaggcactagtttgcatgacgctactgggacccctcggaggatgattttggtagtagggccaaggccaaacaggttagtagccaggctctatgggacttgggttgtttccaagtctgaagcaagatgactgctgggtctacaacctagatatgggtcactgctttcaaaacaaccctcttaggtcttgggatccacaagggtttcataacctcctacatgaatcccaaggctcccagagagagacttttgccaatggataagtgcagaattcttactattgtggggggatatgagcaggtgaccacatatttcaccatcttgctaacatcatcaccatctgtttcctttattgtataataaactagtaaacctaagtgttttccacagatctgtagccattctagcaaatgatgcaactaatggagaggatcatgggaacttctgattcagtcattcagtaagacgtacaggtgacatctggacttgtgattggtgtctgaagtgagagtagtcttgtgggactgagcccctggcctgtgggatctgactctaaatctgattagtgtcagaattgaagtgcaggatgcccaattggtgtgcacaaggaaaagccccacacaagtggtatgagaagtactgagagtggcatgagtatagaaggaaaacctgcttttgcagatacagtggcatacatacaatccttttgtataaccagggttatacaccatgaccaagtagaatttattcttggaatgaaacaatggttaaatatttgaaatcctaacgtgtaatatatcacattaagagtgaaggaaaaaccccacttgattatctcaattcacgcaaaaagtttcaaccaatttcaaaaaccattcatgattttttaaaaagtcatgcaacaaattaggaattgaaggaaactacgtcaacataataaaagttttatgtgaaaaacccacagtggacagcacactcggtgaaagactgaaagctttttctccaagatcaggaacaaaggaagaaggcctgctgtcaccatgttcattcagcagagtactaaaagtactagctacagaaatgtggcaaaaaaaacaacaaccggcatccaaattgaagacaatgaaatgaattttctgtgtttgcagatgatatgatctaatgtgtaaaaaacccaaaagactccataaacaaaaaacaactaataaaatgaattcagcagagtgccaggatggtcaacacacagacaaaaaaaagtttcatttctatacaattacactgaagaacacaaaaaaaagagaaaaccatgccattcacaatagcatcaaaaagaataaacttcttcaaagttaaccaacaaattgaaagacttgtccaatgaaaactacatatcattcctgaaaaaaaattaaagacataaactgaaaggcatccccatgttcatggattgggaaatttaatattgttaatatgtcaatactatctaaagccatctacagatttcatgtaatccttctgaaattctaatgacattttttgtataaacggaaaaatctatcctgaaattcatatgaaacctcgtgggattccaagtaggcaaaacaaccctaaaaactaggaataaagctggaaaaatcacactttctgatttcagaacttactgcaaaatgagagtaatcaaagagtccaatattaatcaatgcatatatagccagatgcttatcaacaagggtgccaagatcagtcaatggggatatgacagggttctgaactgtgctaggaaaactgggtatctacataaaaaagaataaagttgaactatttttattttttgtttgtttgtttttttgagacagaatctgtgtcgcccaggctagagtgcagtggcatgatcttagctcactgcaacttctgcctcctgggtttaagtaattctcctgcctcagcctcctgagtagctgggattataggtgtgcaccaccatgcccagtgaatttttttatatttttagtagaggcggggtttcaccatgttggccaggctggtctcgaactcctggcctcaagtgacccacccacctcagcctcccaaaatgctgggattacaggcacaagtcactgtgcccagccaaagttgaactcttaatgccatatacaaaattagcttaaaatggatccataaactaattgtgagatcaaatgctttcatagcactgcatttggtaattttttttggaggataccaaatgtacaggcatcaaaagaaaaaacagacaagttgaaattcatgaaaagtaaaaaagaagtgtgaatcaaaagacatcagtagatttaaagggaaacccacagaatgaaagaaaatatttacaatcataaacctgataagggattaagatgctaaatatataatctgtaaaatccaacaattaaaagggtccaaaaatctgccacagacttcagagacttcacgtctctactaaaaatacaaaaattatttctccaaagacatacagatggccaataagcatgtaaaaagatactcaccacactaattattagggaaatgctaatcaaatctataaggagatactactttatctccattagaaaggctgccgttaaaaaacagaaaataagagctgttggtaatgatatagagaaatgggaaccctgaggcactattgcagggaatagaaaaaggtacagccactgtgaaaaacagcatggcaattccttaaaaaattgaaaatggaggccaggcgtggtggctcaagcctgtaatcccaacacttggggaggctgagatgggcggatcacttgaagtcaggagttcaagaccagcctggccaacatggtgaaaccccatctctactaacaatacaaaaattagccaggcgcagtggcatgtgcctgtaatcccagagggctgagacaggaaaatcacttgaacccagaaggcagagtttgcagtgagccaagatttgaccactgcactcccaattgggggacagagaaagactcatctgtcacaaaaaaaaaaaaattaaaaatagaattaccatatgatccagcaattccacatctaggtagacactctgggaaactgaaagcagtttcaaagagatatttgtacacccacgtgacagagcaggagcatcgccatcttggacaaacaccgccattttaaattccccttggccgagcgtggtggctcacgcctgtaatctcagcactttgggaggctgaggagggcggatcataaggtcaggagatcgagaacatcctggctaacccggtgaaaccccgtctctactaaaaatacaaaaaatgagccgggcacagtggcgggcgcctgtagtcccagctactcgggaggctgaggcagaagaatcgtttgaacccgggaggcggagcttgcagtgagcccagatggcgccactgcactccagcctgggcgacagagtgagactccgtctcaaaaaaaaaaaaaaaaaaaaaagtttcccttgattaaaaactgcctaaatccagcccaaaaacacaacataatggctaatgtcagcatgaccataaaggacaaatgacacttctgaccagaaacattccaaccccgagataaacctccctctgaacagaaacattgcagccccacaacaaaactctcctctacccaaaaatattccaaacttgcaataagctctcactccctaaacccttaaatatccttattctgtaagagagaacatgcctggcctaaatcggccagaagcccctctcaggtttattttcccaaataaacctgtctttgacggtcaagctgcttttcgtgtttgtttcttctttctttaatccttacaccatgttcatagcagcattatgcacaatagctaaagtagaggcaccccaagtgtcccttagtcaatagatacataagtaaaatgcagtaaatacacacagtgcacattattcagcctttaaatagaaggaaattctgacatatgctgcaacatggatgttaagaatattatactaaggaaataagcctgttataaaataaacactgtattattccacttatatgaggtacttacaacagtcaacattatagaaacagatagtagaatggtggttggcaggggttgggggaatggggagtcattgtttaataggtatagagtttcagttttgcaaaatgaagagttctggaaataaatggtggtggtgtttgttcaacaatatgaatgtccttaataactctgaacagaagtgtatgctttaaatggttatgacaccaaattttatgtgtatttcacaatttttaaaaattaggaggaaaataacccagccaaaatcatgagcaaaagacgtgtaaaccaggagttgagaaactctttctgaaaaggtcaagagtgctttcctgttccacagagtctctgtactgactattcaactctattataataggaagaaagcagccatagacaaaaagtagacaatgagtgtgctaatcttgcaatgaaacattttttattttttattttttttgaaacgaagtttcactcttgttgcccaggctggagtgcaatggtgctatctctgctcaccgcaacttctgcctcctgggctcaagtgattcttctgcctcagccttccaaatagctaggattacaggcatatgccaccacacccagctaattttgtatttttagtagagatggggtgtctccatgttggtcaggctggtctctaactcttgatctcaggtgatccgcctgcctcagcatcccaaagtgctttgattataggcatgaaccaccacactgggccgaaatatttaaaaagttgcatttggttactggtcagagtttcccaatcaaatgcataagctggttaccactttgaaaatgagtagttgtaggccaggagcagtggctcacacctgtaatctcagcactttgggaggccaaggcatggggatcacgaggtcaggagttggagacaagcctgaccaacatggtgaaaccccatctctactaaaaatacaaaaattagcatggcatggtggcgtacacctgtagtcccagctactcgggaggctgaggcaggagaatcgcttgaacccaggaggtgaaggttgtggtgagccgagatcgtgccactaaactccagcctgagcaacagagcgacagtctgtctcaaaaaaaaaaaaaaaaaaaaaaaaaaagaaaagaaaaaatgaatagttgtacattactgagaaaattgaaaaaatctgaatttggattcaattttggaataggaaattattactaattttcttatgtgtgattatatgacactttgagtaaacaggaaattgtttttggggagatggactcatgtatttagatgtagaaaattatatcatccataacactgtcaaattatatatcaaatgtataggggcaaaaaaatctaatgtggcaatatattaatatatattttatttgctgcaattttaaaaacttttctatatatttaaacttaaatatataattaaatgtataataaaagtgtaaaaattgcaaactagataatatttggttaatttctaatgcattttgaattgtgcaaaaggaatataaattattattttcacacttttgacattttaaaaatttgtacatctgaatttcattccaggattaagtgtgtgattcaccttgacattcgaatgagaccctctcatggtttttacttgcttgagtttatccagaatgaattcaaattcaaaaagggatgagtaattacatgaaatgcttctgaattctgtcattcttctgaattttatctcatcaaaatccactaacaattccacagaaatgaaaaaaattaacaaaaaatagcacccataatgatatcacaaatggaagctaatatttattgaacataacagtacattctagatagtgttccatgtttttttcatgtattaactcatgtaatacagcaatatactgtaggtactactatcgccatttacatatgatgcccagaggggataagtattatccccaatatcatattggctgtaaggagttgaacgctgatgacgatcattaagatatgtagcatgggggcaggcgcggtggctcacgcctgtaatcccagcactttgggaggccgaagcaagcggatcacaaggtcaggcgttcgagacaagcctgaccaacatggcgaaacccaatctctactaaaaaaatacaaaaattagccaggcatggtggtgcacacctgtaatctcagctacctaggagactaaggcaggagaatcacttaaacccaggaggcagaggttgcagtgagccgagattgcaccacagcactccagcctgggtgacagagcgagactccgtctcaaagaaaaagaaaaaaaaaagatctgtagaatgtctaaagccttttccacatcacacagctctgtttgatgacttttcatcaatttaacagtaattggtgctggaagacttttacatacaaagtataaagagcaatgcaatgctttcctatatcctctcaattttcctctattacgaatggttcgataatgcaaaaatagaagaatgccagaaaaggttttcttttctttctttttttttctttttgagatggagtcttgctctgtcgcccgtgctggagtgcagtggcgcaatcttggctcactgcagcctctgcctcctgggttccagggattctcttgcctcagcctcctgggtagctgggattacaggtgcacgtcaccatgcccagctaatatttgtatttttagtagggacagggttttgccgtgttggccaggctggtctccaactactgacctcaggtgatccacccctcttggcctcccaaagtgctgggattacaggcgtgagccactgtgcccagcccaaaagaggttttcttgtgttgttataaaaatacattataaactatctgaatctgagtaacatttgggttcagagctaaaaaatgacacattactgacattttgaaaagttcacaccggtacaaacaaattgatacctaataagagcttaaccatatctaaaagccttcccgtgtagtctttatccaaattgtttctcagtggtataaatacattgacacactgtacatatatacatatacatatatatgggtccctcctcttggccaagggcattccagagttacctgaaaatctagatcaggccatgatggaagaggggttttcatatgcctcatgatacccctccagcatgaacatcaacacagaccttaagtctgataagaaacatttgtatcctctctcaagcctgctacttggaggcttcatctgcagaataaaacctaggtctccacaaccccttttataacccagacataacctactgataactctttccaccgaatgcccatcggaaaattttaaaatctacctatgacctggaggcacctccttctagttgtcccacccttccagattgaactagtgtaactctggcatgtattgattgatctcatgcctctctaaaatgtgtaaagcaagctgtacccgagccactttggttgggcacatgttgtcaggacctcctgaggctgggtcacagggcatccttaaccttggcaaaatcaactttctaaattgactgagacccatctcagacattttgggttcacaaagggatttttttgtttgtttgtttttttgagacagagtctcattctgttacccaggctggggtgcagtggtgcaatctcagctcactgcaaccgccacctcccaggttcaagagattctcctgcctcagcctctcgagtagctgggattaaaggtgccgtcaccacacctggctaattttttgtatttttagtagagacggggtttcactatgttggctaggctggtctcgaactcctgacctcaggtgatccacccaccttggcctcccaaagtgctggaatgacaggcgtgagccaccacgcctggccttaatttttttaaatagagatggggtctcactatgttgcccaggctgttctcgaactcctgagttcaagctatcctctgcctttggccttgcaaagtgctgggatgacaggcatgagccaccacaccctgccgtaaagggcttcttaccactatgagtactctgatattgagcaaattgcccaaacacactaaaggccttcccacacttctcacattcatagggcttctctccagtatgaatactctgatgtgctttaaggcctgagttgagcctaaaggacatctcacatttgttacattaaaagggtttctcaccagtgtgaatattgatgttgactaagtcatccatacacactaaaggccttgtcacattccaaacatttatagggtttctcaccagaatgaaatctatgatgtacagaaagttggcggctagtcctaaaagcttccccacactctttacattcataggttttctcagcatcatctcttgttcattgaacatgtatatgaggctgaagggtgttttccttgttttctgtaacatctgaggagtaaggaaaggggtattttcttcttacctgtctgaaaatcttgtttttttaaagttaactgttgttgttttttttaagtaagattgatgttttctcaaaggtgagccttgaaatttgtaaaattggaattataagaaagagaaacctacaaagcacagacattaagacaaccaggtagcaacagaattaagttccttttataatagcagactaatggacaggtggtcttttttatcttctgtgatgatacattattacactacctatcatgtacttgtttctatggattatcttgattcatcttcagacctgtcatgtgtagtgagatggggaaacagaggcaccaagatgttgacatctcacaatgcagagctcagtatcactttcttagaggctgagaagacagcctgtctccttaattttaccaggataccacttaatttatgcatagatttttaaacctgtcttttttttttttttttttttttaagagacaaggtctcgctctgttgcctaggttggagtacagtggtgtgaacactgctcactgcagcctcgacctcctgggctcagcaatcctcctgcctcagccttccaaagtgttgggattacaaatctgaaccaccacacctggcctaagcctgtcttctttactgagtaattcatccttgatactatttacccatcgattatataatttaacatcaatcttattaataatggcataaggccgggtgtagtggctcatgcctgtaatccagcactttgggaggcagaggcgggcggatgacctgaggtcgggagttcaagagcagcctgatcaacatggagaaaccccatctctactaaaatacaaaattagctggcgggggtggggttggggggtgacacatcccaggctggagtgcagtggcaccatctcagctcactgcaacctccgcctcctgggctcaagtgattctcctgcctcagcctcccgagtagctgggactacaggcatgtgccaccatgcccggctcttttttttttttttgagagggagtttcactcttgttgcccaggctggagtgcaatggggtgatctgggctcactgcacctccgcctcctgggttcaagcgattctcctgccttaacttcccaagtagctgggattacaggcatgtgccaccacaccctgctagttttgtattttcagtagagatggggtttctccatgttggtcaggctggtctcaaactcccgacttcaggtgatctgcccacctcggcctcccaaagtgctgggattacagttgtgagccaccgggcctggtagcccagctgatttttgtatgtttagtaggtatggggttttgccatgttggccaggctggtctcgaactcctgacttcaagtgatcctcctgcctcagcctcccaaagtgctgggattacaggcgtgagccaccacgcctggctaaaaaaaccaaaaactttagataagtgaatttggaggaaatatttataacagataaaatggacaaacagataataattctaatttactgtctctctggcttaataaaatattagtcaataccctaagaagaaaggaacaaaataaaaattagccgttcacaaatacaaatagtcaacaaagaaagccaaaacctacgatctctgaaattggctcttgaatttattgaacatgcaatgacttcagattaggaaatttcaaaaatgttttttaaagtttcactttttggaatttaaaattaatccaaattatttaatattcaacatttggaatttaccaatcaatcctctttcattttatttttcacccttagaataattcctttttcaagagtttaaaacatttttaaaattaattgattctgcaggctgggcagtgagctgtgattgcaccactgcactccagcctgagtgacagaacgagaccctttctccaaaagataaataaataattgacttaatttttagaacagttgtaggtgtacagaaaaacagagcagaaggcaaattgagctctaatatccccctcacaccatagtacacacacttcctctattatcatcttgttagtgtggtatatttgtatgcttgatgagccaatattaatattattaagttcatggcttatattaagattcactctttgtgttctaccatttatggactttgacaaatgcatgaggacatatatccaccattaaagggtcacagagaaaagtttcattgccctaaaaatcctctgtgctccacctattcatccttccctctgctcaagcctctggcaaccactgaactttttataataccatctgcctagttttgcctttttctagtattttatataattggaactatacactatgtggccttttcacattggcttctttcacttagaaatacatgtttaagattcctccatgtctttccatgccttggtggttcatttctttttattcctgaagaatattccattgtatgattgtttcagagttagtttatgcatttccctattgtaggatatcttggttacttccaatctttgttggttatgtataagctgctgtaatcattcatgtgcaggatttgagtggatctaagttttcaacttatttgggtatgtaacaaagaatgcaattgccagatcatagggtaatcatatgtttagttttgcaggaatttgcaaaactgccttccacagtgactgtaccattttgcattcccagcagcaatcaatgagagttcctgttgcgccgtatcctcaccagcatttggtggtgtcagcgtttggatttgagccagtctaacagatgtgtagtggtatctcatctttgttttaatttgaattccctagtgacatatggtgttgagcatcttttcagatgtttatttttgctacctatatagcaaagggcagatacagatgatggactgcggggaaagagcttgctgtgatgataggaagctgcagtcagggatgatctcagggttacctgggcatcaactgtgctttctcctgtcacataaaatgtggtctacctgagttttgattggaaacagaataatacctggttgtccataaatatttctgactgaggcttgagatttatgtatgttttgactgaaaggtcatataagcccaatatataaacaggttggggtacaacagggaatgactgtcagagatgttgagagtctacactgaatggatgatgtcactgcctgcccatgtctttctcattatggactttcagtgtttatttgccacttgaaaggccactgagataggctacatctgatttttctcttgaggatctctattactgagaaatttctgtattctgggccacactgggttcataatctgactatatatatcatgtgtgtgtttgttccttccctaaaatgctcagttcagctgcagttctagaggtagatactactatgtttgtatttcagagagctgaagatctgaggtctggagaggttagtgtgtagaaagttatgttgaataagtggcaaggctatgtggccaggtcagataagctgccttcggattttgctcttgaacttctactggataatatcttttcataatagaaaagaggagagtgaacttaggtgttttgttcaaatcatcgactgtaggagttctttcaagatatgatgaaaagcaataattgtctcattttacattacctataattattgctcaccagaaattgattatcgatgcagcaaccttttacattcctctctgctttattatgcatggccgggcttcactgtaactaagagggtccaagattcagaaatatctttaacttgcaatgcttggtcacaggtatccaactgaaaaatattttgctcattagccatatggacacatatggtaaactacagccagagacacaaaataagaagaaagggcgatcagaagtcctgtgtctccttaaattttgtatttctattcaaatgcatctagagtcatgaggaagttgaggaaatgggaaatgcaaagtcctaatcaaagcattcccgcatttcagttatctgcattattgcacatttacatttataatgcatacataaaattcaattcaataggtataaaaatgttaagtaaccttttctctcatgcactccagtcattcagtagctcacttgagagtcaatattttaattttgttttgaatcctttaattttttttctttttctttttcttttttttcttttactttttttttttgaatcaaagtctcggcctgtcacccaggctggagtgcaatggcacgatctcagctctctgcagcctcagcctcccagattcaagtagctgggattacaggcatgtgccaccacacctggctaattttttgtatctttagtagagacggggtttcatcatgttggccaggcctgatgtcgtgatccacccgccttggcctcccaaagtgctgggattaccggcatgagccacgcgcctggccaatttttttctttttttaaatgaagttttattgtgtatatttaaggtacacaatataatgttataggatatatatatacatagtcaaagagttactatagtgaagccaattaaaatatctatcatctcacaggtacccacattttttggtgtggcaagggaagctaaaatctactcatttagcatgaatcccatatacagtacaattttattacctatactcctcatgttgtataaaagatgtataggattgttcatcctacgtatctgctactttgtatctctgacccacgtgtcctcatttcctcccttcctttctcactggtaatcactgtggttctctgtttttgttgttgttgttgttgttgttgtttgagagggagtctcgctctgtcgcccaggctggaatgcagtggcgtgatctctgctcactgcaacctccgcctcccgggttcaagcaattctcctacctcagcctcccgagtagctgtgattacaggcgtgtgccaacacaccaggctaattttttgtatttttagcagagacggggtttcaccgtgttagccaggctggtcttgagcttctgacctcctgatcctcccaccttggtctcccaaaatgctaggattacaggcgtgacccactgcatccggccttctatttctttatatgtgaaaattattttcagattccacatgtaagtaaggtcatgcaatatttttctttctgttgttggctaacttcacttggtataatgccctccaggctcatccatgttgtggcaaatggaaagatcttgttcttttttagggctgaacacagaagttattttcatatacaagtatgcaggtgccatacacacacaaatatgtatgtatatatcatactcacatacaatttcaaatacatctatgtgttacatgcatatataagtatttctgtattttcacagaaatgtcactctaaatcagtacctagggagggtcatcgttttcttgagctacaaagcaagacacagtatgagtggctgcaccctagtttaataagtcctctaagtcatattgaggatttttcctgttttctttcgttgttgttgttttattttgctgtgttttgagactgagtttcactcttttgagtgaagtggcatgatcttggctcactgtagcctcccaagtagctgggattataggtgcccccccaccacgcccggctaatttttgtatttttagtagaaacggggttttgccatgttggccaggctggtctcaactcctgacctcaggtgatccacccaccttggcctcccaaagtgctgagattacaggcgtgagccaccatgcttggctgctttcaccatttcagactgagcttagagaagaacctgaggaaaaacatgacttcataatttgatgaatggagaaatctctttccattcaccctcctttgctctatttcattcttattgtgaaatttgcaaacaaagatgtggatacattggttattaaataaacatctgtgtgatacctatccaggtgaagaaatagagcacaaccaacaccaagaagtcctctgtatgcccctaactgatcctaaagtcttccttccccttattagtaacagatatacagatatccacattacctgtggatatctgccatcctctccttgcttctctttgtaattttattatgcattttcttttctttatttttttggacacggagtctcgctctgtcgcccaggctggagtgtagtggcatgatctcggctcacggcaacctccgcctcctgggttcaagtgattctcttgcctcagcctcccgagtagctgggattacaggtacaggccacgtgccaccacacctggataatttttgtatttttagtagagacagggttttgcatgttggccaggctagtctcaaactcctgaccccaaaacctggctttattatgtattttttatgtgcctaaagtctgattttgcccggtttttctcttacataattggagtaatagtttgtatcctactgcatctggcttcttttactcaatattaagtatttaagattcacacttagctttgtttctgcattctattaaaacggtacaccagccaggcgtggtggcttacacctatgatcccagcactttggaaggccgaggcaggcagatcacttgaggtcagcctcaggagttccagaccagccgggccaacatggtgaaaccccatctctactaaaaatacaaaaattagaccgtgcggtggctaacgcctgtaatcccaatgctttgggaggccaaggcaggcagatcacggggtcagaagattgagaccatcctggcaaacatggtgaaaccctatctttactaaaaatacaattagcctggcgtggtggcatgtgcctgtagtcccagctactgggaggctgaggcaggaaaaccacttgaaggcagaggttgcagtgagccgagattgcgccactgcactccaacctggtgacagagcaagactctgttaaaaaaaaaaaacccaaaaaactaaaattagccaggcgtggttgtgcgcacctgtaatcccaggtacttcggaggctgaggcatgagaatcacttgaacctgggaggtggaggttgcagtgagccaagatcgcgctctgcactccagcctgcgcagcagagtgagactcggtctttaagaaaaaaaaaaaaaaaaggctgggtgccgtggctaacgccagtaatcccacagtttgggaggccaaggctggtggatcaccagaggtcaggagttcgagacaagccttaccaacaaggttaaaccccgtctctactaaaaatacaacaatttgccaggagtggtggcacgtgcctgtaatcccagctacttgggaggctgaggcaggagaattgcttgaacccaggaggcagagtttgcagtgagtggagatagcaccactgcttgcccagatcaagagttaccaataccaagacataaaactgcacagagattggacctagagcagcaggaggtggtatataaatcacagatactagaggaaattgaaagagggagcagaaaaatgattcatctgtatcaggtgtggtcggcaagttgtaggatgtagaatgtagctggtggatataggaagagaattagaaaaaattaatgctcattcaagtttattttatgaactagccaaaatgtcacatatggatattcacagtaggtagaaagatcagagcagaagtagcacttttggcacatagttattgggattgagggagacttcattttagctgtaattttaaaatagatttggttacttttaattaatctttctaaagcttttaattttgaaaaagctttaatttttattgtggcaaaatatacatagcataacatttgccattttaaccattttaagtgcatagttcagtgtcactaaatacaatcacacgattgtacaaccgtcacactttccatcatctctagagctttttccttttcagtttcccaaactgaaactctgtaccctttaaacaatagcccttcattactctctcctcccagtacctgggaaccatcattctacttttggtttctatgaatatgacatgctcgatacctcatataagtggaatcatgcagtattagttttttgtatccagcttctttcacttagtcttatgtcaaggttcatccatgttgtagcatgcatcagaatgtccctttttaaggctaaataatattccactgtatgtctgtaccacattttgtttatccattcctctgtcaatgaatgcttccaccttttggctatcatgaatgatgttgctatacacatgaatttgcaaatatctgttgaagtccctgctttcaattcttatgggtttaaacccagaagtggacttgctgactcatacagtaattctatgttccatttttatttatttatttatttttgagacagagtctcactctatcgcccaggctggagttcagtggcatgatctcagctcactgacacctccgcctcccaggttcaagcgattctgctgcctcagcctcctgagtagctgggattacaggcacacagcaccacgcctggctaatttttgtatttttggtagagacggtgtttcaccatgttgttcaggctgatcttgaactcctgacctcgtgatctgcctgcctcagcatgctaaagtgctgggattgcaggcatgagccatgcgcccagcctatgttccattttttttttttttaatttaggaaccactgcactcttttccaccatgactataccgttgcagaatccactggaaaggcacaagggttctgatttggctacatcctcaccaacacttattttttcctgtttttttgatgattgacatcctaatgggtatgaagtggtatcttattgtggttttgatttgcatttccttagtaatcagtgatgttgagcatctttcatgtgcttgatggccagttgtatatcttctttgggaaaatgtctatgtaagtcctttgcctattttttagttaggttgtttattgttgagttgtaggaattctttatatattctggatatcgatcacttatcaaatatattatttgaaatattttcgtccattctgcaggttgtcctttgattgcacaaaagttttaaattttgatgaagtccaatttgcttatttttttcttttgttgcccacacttttggtgtcagacagcttttagtttacagttataaatatatcatgtctctcctgcctcatatgtaccactggacaaggtcccttttatgtgctcagattctgttagaggtaaatgtattttgaagtggagaacaaagataattgcaaaattggcatggagaactaaagtaattatgaaagttccagatacaaagagagtgggctcaatatgccagcagttctctaccaatccatcctagaagctttcttttaggattgcctaaataatgcaggggatgggtgcaagacacacaagtgttctagaagcatgtaaacaaggtacagagaagaggataagataaaataagatgagataagaatattaggaaagccttgttcagaagattgcctacagaggcaaaagggacagtttcactttgctgagggaaatagggtggtaagaaccctggtgaggaagaccctcgcttaccctgatacagagagaaggtgtaaaataacttaatgggagaccattaggctgcgatagttcccatggctgggttcctacatagacaaaatgaaacaagcttcacccatcacaagtggccagctgaatattagctgtgtaatgagtggccttccaccaggatagttcaaataatgcaactgcccaaattttcgccaatcaaataatttatctactctacttctacatccaccctataaaagccttccctgcaaatgcctccagtggatcctccaaccactttcagtttggggctgcctgatccatgaatctctgtttgctcaaataaactctttaaaattttaatatgctcaagtttatattttttttccattttaaaaattgagatgggatcttcctatgttgcccaggctagtcttgaactcctgagctcaggcaatctgcccatcttgccctcccaaaatgctgggattacaggcgttggccaccacgcctggccacaaaaagtctgcgtgtatggtagcttcaaaacccatttgtaaataggtgttttcataacaagatgaaaacaagaaaacattgaacttcatataatagaagggttctgcctggatttgcatgtgggccccatcatttgtttgctgttgggccatggtcaggttacttcctccacatagggtttaagcctgtgcatccttcatctacaaaatgggaatattaagaatatctaacaattagaagtggagaaaacatatgtaagggcctttgacaagagcttgtcaaagctcaataattgcccttaataattgttagctatcattcaataatcataatcataaaaatatatgactcaaagaaagattcctacttcatatctggcttctcaaaagaatatcagaaattggacctgtgaaaggaatgacactgagatgtattttcacattgctaagttggttttttctctttgccatttaatttctgcagtccccactctaagcccatggttcaccattttattcttcctcctaaaatttcttcccttctggtaagattatctttgccttaacaagggcccttttcatccacccactcccttacccttcccagaagtggttaatgggcacaaaaatacagttagatggaaagaaaagaacttctagtgttcaatagcacagtagcatgacgatcgttaacaataacttaccatgtatttcaaaatggttagaagaaagatttggaatgttcccaacacaaacaattgataaatgtttgaggttatggatatgcaaattatcctgatttgatcactacatattgtatgcatgtatcaaaatatcacatgtaccctagaaatatgtataattgtcatgtatcaataaaaacaaaaagggcctatttctctttgccttcctccccaaattccctcctgtcccagatatgtgttgttcctggtgctctcctgccccccgttcattcagcactgagccagcaggaaggatctcacaggtcatatcctgagatccagccctccaccccttcaggtaataatcctcctgcttttggtcattcgtatcctttggttcatagatattttgagtctagtgccttctaattgctgacctaaataataacccttggtttttaaagataatacaaagtggatttcagtaacaatcttgagtcttcacagaagctaatgaagtcagggattccatgaagccatccaagcatatagagctcatttccctgggtcccttttccttagctcaaggccacacaaaatcagaacatgaattccagcccacatttgcattatgtcgaaataattatgagttacaaatgaagctaacaaatagctaaatatgttctattcatctactttgataaatataccgccataataacccacaaggtcaaagttgagtgtagaattctcagattctttggtgctctgcacgagaatgtggtagcagaaggagagccaatcctcagccccaggccaaacttttccctttcatcgtaggtagccctgtcctcacttgagaagccttgcgtacccccgtgtgggggactccctaggccccatgcaagctccatccacatttctcaccccttcagacagcagagtcttgggcaccatttggacaagcagtttgcgctttgaaataaacccaggggagaggccatgcaggctcaggcacatttggccaggtgtctgagtgcccagagtatggcctagaagagaacgtgagagctctgggtgggccggggtacagtcagtggagggccagagaggcaccttctcaagcgcaggattcagggcaggggtcctcttgccgagatggatggctacgattgctcagtgcaatggcgcctgcgtcatgtcttctcagcgcatctttcactcagtctcagccaccatggggagttccatggaagcgcaggcttcccctgtgctgccagtaaactcaagctacactttctgccccagggcatctccattattttggagattataggattttggctgagcacaaacacacagcccagaaacacttgcaggttaacagcctcaggggaagatctcaaccagtgtgggacaggtgggcaaatgctccaggctcctgtttcaggtggacagttcgggaagactttccggagactctcagaaggttctggcagaaaagaagtccatggcagcagcctcaatagcatgcctcaatagcaggcctcaggtgatccgtccaccttggcctcccaaagtgctgggattacagacgtgagctatcatgcccagcaacataacatttatatgcacaggaaagcaaaaaatgtcgtgtgactagctctattgcgatattcgccttgttgtggtgacctagaaccaaacctgtaatatctccaaggtatgcctgtacccctaaaagaagagctggagtaaggacctgggtgtgggtggtttatttgggaagtgatcccaagaagcaagagtgagaagtggggagagtgagccaggtgagaaagaaaagccaaaatgatggcattgtttgaaccccggaggcagaggtttcagtgagccgagatcatgccactgcactccaacctgggtgacagagcgagactccgtctcaaaaaaaaaaaaagttgtgtttacactattgtagtcaattaagtatgcaatagcgttatgtttaaaatataatgtacataccttactttgaaaatacttgattgccaaaaaatgctaaccatcatctggtccttcatcaagtcgtaatcattttgctggtgcatggtcttgcttcagtgttgatggctactgacttattggggtggtggttgctgaaggctggagtgggtgtggcaattccttaaaataagatgacaatgtagtttgctgcattgattgactcttcctttcaccaaagatttcactgtagcatgctgtgcagcttgatagcatcttacccacggtagaatttttatcagaattggaatcagtcctctcaaaccctgctctatcaactaagtttatggaatattgtaagtcctttgttgttctttcaacaatgttgacagcatcttcaccaggagtagattccatctcaagaaaccacttctttgctcattcataataagcaactcctcatccattaagattgcagctatttggcagggcgcggtggctcaggcctgtaatcccagcactttgggaggccaaggcaggaggatgatctgagcttgggagttcgagaccagcctcacctacatggagaaaccccgtctctactaaaaatacaacacatggagaagccccgtctctactaaaaatacaacattagccggaatggcagtgcatgcctataataccagctcctcgggcgtctgaggcaggagaatcgcttgaacccaggaggcggaggttgcagtgagtcgagaacgcaccattgcactccagcctggacaacaacaatgaaactctgtctcaaaaaaaaaaagaaaagaaaagaaaaaagattgcagcaattcactcacatcttcaggctccacttgtaattctctttctcttgttatctccaccacaactgtggttacttcctctgctaaggtcttgaacccctcaaagtcatttatgagggttggaatcaacttcttccaaactcctattaatgctgctacttttacctcatctcaagaatcatgaatgttcttaatggcatctacaatagtgaatcctttccagaagttttccaatttactttgctgagatccatcaaaggaatcatgatctatggcagcaacaggcttataaaatatatttctcaaataataagacttgaaaatcaaaatgacacccaatccatgggatacagaatagatgttgtgttggcaggcatgaaaacagcattcatttccctgtacatctccgttagagctcttgggtgaccaggtatgttgtcaataagctgacgtatttgaaaggaatctttttttctgagcagtaggtctcaacagtgggattaaaatactcagcaacacatgcagtaaacagctgtgatatcatccaagtgttgttccacttatagagcatgggcaaagtagatttagtataattcttaagagatgccctaggatttatggaatcacaaatcagcactggcttttaacaagagagtcagcctgtcctttgaatgtttctttctttttttttttttttgtgagatacggtctcactctgttgcccagactggattgcagtggtgtgatcttgggcaactgcagacttgacctccttggctcaagtgatcctcccacctcagcctcctgagttgcttgtaccagaggcatgcaccacaatacatagctactttttgatttgtttttttgtttgtttgtttgttgttgttgtttgtagagacagggtttcaccatgttgcccaggctggtctcaaacttctaagctcaagcaattttcccacctcagcctcccagagtgctgggattacaggcatgagccaccgtggctggcccctttgaagctctgaagccaggcatggacttatcctctctatccaaagtcctggatggcattttcttccaatagaaggctgtttcatctacattgacaatccattgttcagtatagccaccttcatcaatgatcttagccagatcttctggataacttgctgcagcttctacaacagaacttgcagcttcatcttgcactattatatcatagagatggcttccttccttaaacatcgtgaaccaacctatgctaacttcagacttttcttctgtagcgtcctcatctctctcggccttcataaaatggaagataattagggccttgctatgtattaggctttggcttaagggaatgtcgtggttgacttggtcttctatccagaccacttaaactttctccataccagcaataaggctttgttttctttttttaatattatagaattggtttattgtaaaagcaattgaagaataccagttaaaatcttatcccaatgctacccaatagaaccaagaagcagttaagcaccttttacattaggaacaaggacataaaacaagataccacataaaggctatgattcaaactcaaaaagagaaaggactcttgggtctccttcaggtcaataaagaggttatcataagatcaaagcactgtgccaggtatcacagtactgttacaacactgaggtataactggacaaattaaagttgcagggaaatgaagatctccatactattgttttgtgggtgtacttaagtgattaaaattctagaaacagctgcctttaatgacaggaagatgtaagacaagtgtttattaaagagaaggaagcttataaagttctctctcaatgtcccccaaatcttcacagccccccaaacttcccaccctcctcctaagctaaaactactcagctttatgatgcagacttaatttatggcttactggaaaattataggcactccttccaagtagctttcatcttctgcacattaaaaaaaaatcccagccgggcatggtggctcacacctgtaatcccagtactttgggaggccgaggtgggagggtcacctgaggtcaggagttcaagaccagcctggccaacatggcgaaaccccatctctactaaaaataaaaaattagttaggcatagtggcacactcctggaaattctcctgaggcaggagaatcgcttgaatccaggaggcggaggttgcagtgagctgagatcatgccactgcactccagcctgggcgacggagtgaaacactatctcaaaaaaaaaaaaaaaaatcccaacaacatgttacataatttatatacccaattttgctttaatctttctgctgttttcgtaataaaagccttacagtcaattattatgagtgatcagcctataaacttatatataatacagtgattgcattttttgagcactggaagtacttaaaacttcttacttccaacttttgcactcctccgaaatgaagggccaaaatacttagattttgtaattgggaggaaaagcaatctgtcttctcaagatgatgcttttcatagcagcttttgccaggggaagcgattttatatctgtaataaatccttgaaaataagcgcttattctagaaacattggaagatccttaaaacatagaggtgctagctggtaccatttaaattcacaaccagctattactttatagcttatattgaagagttcattcatgctcattattttcctttaaaaaatataaaaaatactctttagaacccattattactcctgtagacacatacactttttacagcatttctttctgtaaaaatgaaggtataatcatgattatctctatttctttgctaaattcaactgtcaatatacatttattaacctgatcacttttccaggtaactcaagactttgtagtattctctccagcgtctattttcttttttcttttattttctgtttttctttttaatggagacgaagtctcgctctgttgcccaggctggagtgctgtggcgtgatcttggctcactgcaacttccgcctccccagttcaagcaattctctccctcagcttctggagtaactgggactacaggtgcccaccatcatgcctggctaatttttgtatttttaatagagacagggtttcaccatcttggccaggctggtcttgaactcctgaccttgtgatccacctgcctcagcctcccaaagtgctgggattacaggcgtgagccactgcgcctggccctccagggccaattttcagcatatagaagtaggagtaagacttacaagtaagaatcatcctgaaggcaattttttcatatagtctttaatgtgttcatcacaaatgagaacttgagaactacaaactagaatttatttccaaaactaaggcaaaggtaaacttccagaactaaatgtaagtaaaccactataaagcttatttctgtcatgcaccttatgaacctactcagtaatttccaaacaagactcaaattagtccaagggagtccaagggggaaaataaagccacttctggtttgctcttttccaattcatcagataatatctattgtgtgcccagagggcatggagtactcccctaggcactatccgtagtaattagggctttgtttttttattatgcatgtttttgctggagtagcacttttaatttcctttgagaactttttctttgcacttacaacttggctaactttggcacaagaagtatagctttcagcctaggttttcaacatggccttcctcattaagcctaatcgtttcttggtgttgagtgaaagtgaaagacatgtgtcttcctttaatttgaacactaagaggccatttgaggattattcattgacataattttaatatttttgagtctcaaggaagagagagagccaaggagagagagagagaaatggctggccaggggagcagtcagaacacatacaatttttatcaattaactttgccatcgtatagggacctgattcatggcctcccaaaatagttacaacagttacctcaaagaccacctatcacagatcaccataacagagtaatagtaatcgaaaagtttgaagtattgtaagaattaccaaaatgtgacagagtcacaaactgagcacatgatgatagaaacgtggcacagatagacgctccacacatggttgccaaaaccttcaatgtgtgaaaaacacagtatctgcaaagtgtaacaacatgagttatggcttcactcaaaagaataaagggacaaatcgaggaaatgaaaggaccagtccattccaagtacagcaatatcatcagcactatctcactggagtccttcaacaacaaaggcaaaaagtatcctcaacacatttatattataacctaaattcctgttaaacaggtttcggggatttttaaggggctggcccctttattctttcctctatgttaatttttaaattccttatttatttatttattttttttagatggagttttgctcttcttgcccaggcataatctcagctcattgcctcagccttccaagtagctgggactacaggccctgtcaccatgcccagctaattttgtatgtttagtagagacagggtttcaccatgttggtcagtctggtctagaactcctgacctcaggtgatccgctggcctcaacctcctgaagtgctgggattacaggcatgagccaccatgcctggcctctaaattgctcttatggagactcattttcatggttaaaatgtcctgaattgactgtggcttgttggtgggaggagggatggaggaagctacttatggaaaatgaacaaggaagggaagcacaccagaagctagaaagtgtcatcaatttttacatcaaagactccatgacaaagagaaagtacaagtagcctgtttttgtagctgaccattggactgcggactgcacatgcagctaccaggttcttctggatagtcccagttttaaatttttgacctgatattcatgaacatagtgctactggtcagacctttgtccaggtttaagcttcagaaaataaggtcttcatgcagtgggaggcctggttaggatcatgattctgccctggggcatctgccacttctgacctggagataaacttggcatctactatttacctccacattttaacagccaaggatgggctgagcacagtggcttacatcaggaactccagcaatttgggaggccaaggcaggaggatcacttgaggccaggagttcaagaccagcctgggcaacatagtgagacattatctttgtaaaaacaaacaaaaccgaggatcggtgggtggcagggagcagatcaacctgggcaaccattaatctgagagctggaaggacccttagaccagccccccagtaacagatgagactctgctctgggattatagcctaaggtaatgccctgagcttttctagagatttgaaaataattaatcctaaaacccccaagcacactgctactgtttgctatttaataatgttttccaggccgggtgcggtggctcatgcctgtaatcccaggactttggaaggctgaggtgagcggatcacctgaggtcaggagttcgagaccagcctggccaacatggtgaaaccccatctctactaaaaatacaaaagattagccgggcatggtgctgcttggaaggctgaggcagtgaggcagagtttgcaatgagccgagatcgcaccattgcactccagccaaactacaagagcaaaactccatctcaaaaaataataatgataataataatgttttctacaagcaaggggttactttgtactgtgaactggtgtgaagggatccaccatatgtaagcttttggagctgattttattatctgtgttgtcccaagtggtgaagggaagatggcacaccaaaatgggggcattggtgccagtgcatcaggtaaataggcatctaaagctctgagaatagactgctactatgcattataatcaatgctacaataaccttgtaggtttcttttcatgatactgcttgctaagttttttctgtttgcttcaccatattttgaacaattttctattaaattaggatattttaaaagtttgccttttcaatgtcttatttagataaattctgtagttccaaagttatatattttcaaagcctgatgcctttgatgtttgatgatgttaacaatatactattttcaaagccagtttgttatttctacactgatattgggaaaagaataaagtgatgaagtcaacaggtgttattaaaaatgtgaataacaggtaaacgttttgttatttgttttgttttgtctttgaagtatttcacagactagatttgaaggtttatgaaggatggggcaaaattatctaaggaaagttgcatcctatgacctcaggctgacttcaagtaagagtggatttgttaaaggcattgtctttcttggactatttgcatctttgtagaggagcctggagaggcagtatagaaggattgttttagatgttggatctctgtaacctccatttacgttttcttgagccattgtcatttggggaaaagcatgaaaaagaaaagatcattataatgctactgtaatgcacatcacatagaattgcaatgatttgttgattgttcattccaggccaagaacagtgagtttctccagccaaaggccttgtatttattgatctttctgtcccacaggcctaaaacagtggttggcccatggacagtttaataaatgtttgctgactaatatgtagcatatctaaaaccttttccatggccttgtctctggagattaagattttccagcatttgtacataaaagatgttgatgcataactgtaggtgaaaggcacttcttacatggcagtggcaagagaaaatgaggaggaagccaaggcagaaacccctgataaacccatcagatctcatgagacttattcactatcatgagaatagcacaggaaagactggcccccatgattcaactacctcaccctgggtccctcccacaacatatgggaattctgggagatagaattcaagctgagatttgggtggggacacagccaaaccatatcaccaaatatggagagactggatcaacaagatcatctcaaactaatacaggaggtgagagtttaaattagaacaaccactttggaaaacaataggattatcttataaagttgagcattctcatatgttatggcacagtaattcctctaccaaaggccctggagaaactcttgcccatgtgtacccgaagtagtaaaaaaagaaaataaatgctcatgtaatgccattcataatagcaaaaatctggaaataagccaaaagttcattaatactagaatgggtacattaataggagaatgggtaaataaattatacccttaaaaactgaataatatgttatttatggcaatcatatatatgcaataaaacaatttttttaaaggaatggaatcctaaatataaattcagggtagtagttaccgctggggctgaaaggtgtgaatcaggaaaaaaagacagaggaagagcagatgttaggatcagaacctagttcttgggttgtgtggtgggttcacaagtgattaccatgttgttcaaatacattcaaatacatttacatacaggccaaggcacaggcaaggatgaaataggagccaaggtatgctgtgagccaaggattatgattgatccaattttgtgcactttaagccatttgaaaaacagaaaagcaaaacaacaaaataatttttaagaaattgaatataaggtgctaatttttaagaaattgaatataggcaaggatgaaataggagccaaggtatgctatgagccaaggattatgatttatccaattttgtgcactttaggccatttgaaaaacagaaaagcaaaacaaaataatttttaagaaattgaatatagggtgctaacttttaagaaattgaatataggcaaggatgaaataggagccaatgtatgctatgagccaacgattatgatttatccaattttgtgcactttaagccatttgaaaaacagaaaagcaaaacaacaaaataatttttaagaaattgaatatagggtgctatggtctgaatgtgtctccctaaaactcatcaccaatgtcatagtattaggaagtagggcctttaggaagtaattcagtcatgaagggagagtcttcatcaatgggttacacaaagactggagggagtgggcttcccctgttttgcccttcctccttctgccatgtgaggacacagtgcatcccctcctgaagacacagtgcacaaggcattatcttagatgcagagaccaggccctcaccagacaccaatcctagtggcaccttgatcttggacttccagcctatggaactttgagaaatacatttctgttcttcataaattacacagtctagtgtattttgttatatagtagcacaaacgcactaaggcatagtgcctcgtcattttcttctagaattttctttgttgcctgtctagcagtgtgccattttatatttgatccttcgtaatatctcttacttttggatttttacatttctgttgcaagtgtattcttaggtacatgtttttcactatttgttagtgtccaggtcagaaagtccagaatacattctcttaagggttcagtttctgcagcaacgtaagtattaatgcctcctgtgaactaggtatttcctttccaattgtaactgccatctggaagcgaattggaattacagtctatgagtgtgggattgatttttaatgtatctgggttatggttaaatgctggtttttaatcacacagattcatcgatggcttggcacactagagcatcacttgctagttatctctatatttttccatgctgttagagagggaaagtacagactgtgaagttggaccagctgtcatacacacaacatttggggagctttgatttttttaaaacctttagctgcttaactgtcacatgtagcagctcaggtgaaaggcacttttattgtggggactttcccttagtgctctgtggtgcaagagcagacctatgtagaagcatttaagtattttgtgcatcaacaggacaattataggaaaaaattttttaaatataattttatttcattttctgcattacttagaagcatcagtaggatgaaaacaatatttgtttcttaaacctgtgcacaaattaattgatgtgacacacattaattcatgattattttcttaatgaattgattctaaagcttctctaagataggaaggcataagacaaccaaaaagaaatattgatttataactgttctaatactgctcagcatttttaaagtacactatagccagaaagcatgttataattactaataagataatccacagaatgccttgctgagccaggtaggtgtagaagaaataaattgtttcatattggaggaaagtgaacactataaatcaatatactagtgtgaaattttgcatggctacatgctatcatcaccagcatcacaaatgacttaaggaattcctcagatgagagtggactcctattggtggccacaatgtcacactctttttttaattttttaatttttatttaaaaattttttttaatatactttaagttttaggatacatgtgcacaacgtgcaggttagttacatatgtatacatgtgccatgttggtgtgctgcacccattaacttgtcatttaacattaggtatatctcctaatgctatccctcccccctcccccaccccacaacaggccccagtgtgtgatgttccccttcctgtgtccatgtgttctcattgttcaattcccacctatgaatgagaacatgtggtgtttggttttttgtccttctgatagtttgctgagaatgatagtttccagcttcatccatgtccctacaaaggacatgaactcatcattttttatggctgcatagtattccatggtgtatatgtgccacattttcttaatccagtctatcattgttggacatttgggttggttccaaatctttgctattgtgaatagtgctgcaataaacatacgtgtgcatgtgtctttatagcagcatgatttctaatgctttgggtatatacccagtaatgggattgctgggtcaaatggtatttctagttctagatccctgaggaagcaccacactgacttcacaatggttgaactagtttacagtcccaccaacagtgtaaaagtgttcctatttctccacatcctctccagcacctgttgtttcctgacttattaatgaccgccattctaactggtgtgagattgtatctcattgtggttttgatttgcatttctctgatggccagtgatgatgagcattttttcatgtgtcttttggctgcataaatgtcttcttttgagaagtgtctgttcatatccttcacctactttttgatgaggttgtttgtttttttcttgtaaatttgtttgagttcattgtagattctggatattagccctttgtcagatgagcaggttgcgaaaattttctcccattctgtaggttgcctgttcactctgatggtagtttcttttgctgtgcagaagctccttagtttaattaggtcccatttgtcaattttggcttttgttgccattgcttttggtgttttaacatgaagtccttgcccatgcctatgtcctgaatggtattgcctacattttcttctagggtttttatggttttaggtctaacatttaagtcttcaatccatcttgaattaatttttgtataaggtgcaaggaagggatccagtttcagctttctacatatggctagccagttttcccagcaccatttattaaatagggaatcctttccccatttcttgtttttgtcaggtttgtcaaagatcagatggttgtagatatgcggcattatttctgagggctcttttctgttccattggtctatatctctgttttggtaccagtaccatgctgttttggttactgtagccttgtaatatagtttgaggtcaggtagcatgatgcctccagctttgttcttttggcttaggattgacttggcaatgcgggctcttttttggttccatatgaactttaaagtagttttttccaattctgtgaaaaaagtcattggtggcttgatggggatggcattgaatctataaattaccttgggcagtatggccattttcatgatattgattcttccaacccatgagcatgtaatgttcttccatttgtttgtatcctcttttatttcattgagcagtggtttgtagttctccttgaagaggtccttcatgtcccttgtaagttggatccctagatattttattctctttgaaggaattgtgaatgggagttcactcatgatttggctctgtttgtctgttattggtatataagaatgcttgtgatttttgcacattgattttttatcctgagactttgctgtagttgcttatcagcttaaggagattttgggctgagacaatggggttttctagatacacagtcatgtcatctgcaaacagggacaatttgatttcctcttttcctaattgaataccctttacttcctactcctacctgattgccctggctagaacttccaacaccatgttgaataggagtggtgagagagggcatccctgtcttgtgccagctttcaaaggaatgcttccagtttttgtccattcagtatgatattggctgtgggttgtgggtttgtcatagatagctcttattattttgagatatgtccaatcaatacctaatttattgagagtttttagcatgaagggctgttgaattttgtcaaaggccttttctgcatctattgagataatcatatggtttttgtcattggttctgtttatatgctggattacatttattgatttgcatatgttgaaccagccttgcatgccagggatgaagcccacttgatcatggtggataagctttttgatgtgctgctggatttggtttgccagtatttcattgaggatttttgcatcgatgttcatcaggaatattggtctaaaattctcttttttgttgtgtctctgccaggctttggtatcaggatgatgctggcctcataaaatgagttagggaggattccctctttttctatttattggaatagtttcagaaggaatggtaccagctcctccttgtacctctggtagaatttggctgtgaatccatctggtcctggactttttttggttgttaagctattaattattgcctcaatttcagatcctgttattggtctattcagagattcaacgtcttcctggtttagtcttgggagggcgtatgtgttgaggaatttatccgtttcttctagattttcagtttatttgcttagaggtgcttatagtattctctgatggtagtttgtatttctgtgggatcggtggtgacatcccctttatcattttttattgcatctatttgattcttctctcttttcttctttattagtcttgctagcagtctatcaattttgttgatcttttcaaaaaaccagctactgaattcattgattttttgaagggttttttgtgtctctatttccttcagttctgctctgatcttaggtgtttcttgccttctgctagcttttgaatgtgtttgctcttgcttctctagttcttttaattgtgatgttagggtgtcagttttggatctttcctgctttctcttgtgggcatttagtgctataaatttccctccacacactgctttgaatgtgtcccagagattctgatatgttgtgtttttgttctcattggtttcaaagaacatgttgacagtggggtgttaaagtctcccattattattgtgtgggagtctaagtctctttctagctctctaaggacttgctttatgaatctgggtgctcctgtattggatgcatatatatttaggatagttagctcttcttgttgaattgatccctttaccattatgtaatggccttctttgtctcttttgatctttgttggtttaaagtctgttttatcagagactaggattgcaacccctgccttttttgttttccatttgcttggtagatcttcctccatccctttattttgagcctatgtgtgtctctgcacgtgagatgggtttcctgaatacagcacactgatgggtcttgactctttatccaatttgccagtctgtgtcttttaattggagcatttagcccatttacatttaaggttaatattgttatgggtgaatttgatcctgtcattatgatgttagctggttattttgctcgttagttgatgcagtctcttcctagcctcaatggtctttacaatttggcatgtttttgcagtggctggtaccggttgctcctttccatatttagtgcttccttcacgagctcttttagggcaggcctgctggtgacaaaatctctcagcatttgcttgtctgtaaaggattttatttctccttctcttatgaagtttagtttggctggatatgaaattctgggttggaaattcttttctttaagaatgttgaatattggcccccactctcttctggcttgtagagtttctgccaagagatcagctgttagtctgatgggcttccctttgtgggtatcccgacctttctctctggctgcccttaacattttttccttcatttcaactttggtgaatctgacaattatgtgtcttggagttgctgttctcgaggagtatctttgtggtgttccctgtatttcctgaatttgaatgttggcctgccttgctagattggggaagttcccctggataataccctgcagagtgttttccagcttggttctattctccctgtcactttcaggtacaccaataagacgtagatttggtcttttcaaatagtcccatatttcttggaggctttgttcatttctttttattcctttttctttaaacttctcttctcacttgatttcattcatttgatcttccatcagtgataccctttcttccagttgatcaaatcggctactgaggcttgtgcattcatcacatagttttcgtgccttggcttttggctccatcaggtcctttaaggacttctctgcattggttattctagttatccattagtctaatttttttcaacgtttttaacctctttgccatgggttcaaacttcctcctttagctcagagtagtttgatcatctgaagccttcttctctcaactcgtcaaagtcattttccatccagctttgttccgttgctggtgaggaactgcgttccttggaggaggagaggcactctgatttttagagtttccagtttttctgctctgttttttccccatctttgtggttttatctacctttggtctttgatgatggtgacataccgatggggttttggtgtggatgtcctttctgtttgttagttttccttctaacagtcaggaccctcagctgcaggtctgttggactttgctggaggtccactccagaccctgtttgcctgggtatcagcagtggaggctgccgaacagcggatattggtgagcagcagatgttgctgcctgatcgttcctctgaaagttttgtctcagaggagtacctggccgtgtgaggtgtcagtctgcccctactggggagtgcctcccagttaggcttctcgggggtcagggacccacttgaggaggcaatctgtccattctcagatctccagctgcgtgctgggagaaccactactctcttcaaagctgtcagacacggacatttaagtctgcagaggattctgctgccttttgtttggctattccctgcgtccagaggtgaagtctacagaggcagcaggcctccctgagctgcggtgggctccacccagttggagcttcccagccgctttgttcacctactgacgccttggcaatggctggcgcccctcccccagcctcgccgcccccttgcagtttgatctcagactgccgtgctagcaatgagcaaggctccatgggcataggaccctctgagccaggcatgggatataatctcctggtgtgccatttgctaaggccgttggaaaagctcagtattagggtggagtgatctgattttccaggtgccgtctgtcacccttttctttgactaggaaagggaattccctgaccccttgcgcttcctgggtgaggtgatgccttgccctgcttcagctcatgctgggtgtgctgcacctactgtcctgcacccactttctgacattccccagtgagatgagcctggtatctcagttggaaatgcagaaatcacccgtcttctgcatcactcatgctgggagctctagactggagctgttcctattcagccatcttggctccaccgaacaaatttttattgtatcttttagtctatgaagacaaaaccacagtgacagtaactaggtcaaggcattgtattcagagagcgtcagccttggtctttgagagtgagtcctttttaccacactgttaagactcactgagcagatgggaaatttcaggtggaacatgcagtgaatagcaaacacggtggagggtgctcactgtcatgcgctgccatgcctgccatggtcaacagacctgtcttgtccttgacaacaggcaggttgataaacattttcttggagagtttcttgattcttctcagttgtagcaggatggactgacttagaggagctcaggaagattgttatacaacacagaaacacaagatgaattgtactcctcagcaagcctaagttagagcagcaggtccttgaagcctcagccactcctgggacatagcataatgcccctaatgatttgaaatttagtggagagtgggttgctactccctgtgtccaggaacaaaaagagacataaagagcaaaaagttataaaataagtgggactaatatctgcttattttgggaggtagggatttaagatacaagaattcagctgcatgtggaagcttacatctgtaatcttagcacttggggaggccaaggcaggaggatggcttgagtccaggagttggagatgagcgaggcaacatagtaagtccccattcatacaaaaatgtttctgaagaaaagtagttcagtgaggtggcacatgcctgtagtcccagctatgtgggaggctgaggcaaaaaaatcgcttaatcctgggagattgaggctgcagtgagttatgatcacaccaatgcactgcagcctgagagtcctgaaaccccagccggcgacctgaagctcctcctccaccggtaaaagtcggctcaaaaaggccctgaggacaggggtcctgggggtccggccccgaagtcccctctccaacaacgcccgctactccatcaacactccagccaccacagcgactgccacaggagcccccgtccacgcagagccgaaaccgtttaaaggggctacagcctgacttccaagggcaaagcacgagtcggcttaggcaatgcggatgcatgaggcgacaccgctactcctgtcacagtgaccccaatggttgcctgaggacgactccatcaaccttgacaaagcaggagccgtccgtggcagtgcgtcagtgttgaggcgccaggctgacatctccagaaggtcaacaaaactgtttcaggattccaggagacacggaggggcaaacaggatgaagaaacagcaggcggagtctgggaaaagcagcgcggaattccagcccgaggcctgcccggatggtgtttgggtgagtctccccaaaagtcgtgccccacatcatctcgaggaagcgtctgcctgtgtgcccgtggactactctctaaaccgatggttgttcttttgaaaagcagaaccccgcagcctcaggggttgcctggggtggtgtgtttccgttccactgctgtgtatctgtgagtgtgtctcccattctctcttctctctctgtctctcactctctgtctctctctctctctctctttctctttctgtgtggcagggagccgaagggacgggactggggctgggtacaggggaggctgtgtcagggctacctaggcgttggaggggtggggatggggtgaactttgcagaaacctcttcgctcctctgacaggcatcccaaaatgtggcttggactcacacacaggttctctcctggttcccaggtgggctatgcttttatgtggcgttgacagggaggtcacctgtgccccccttccaccaggcacatgcctggacacctttcttcatcttggcatagccccatatgggctcggtgacacacactcaccccatcttctcttggggacgccagtgacacgtgtggttgcattggctccaccttggactcgcccctgtccctgtttgcacttgtcctggaaagcggtgtcttctcgcaggagccccagggctttgggaagcaggacaggccactggtcctccaagggaggagggaggcagagggctcatgggtcagtgaattttcagctgacaccacgccttgaggcccatgggatctttctgtgccccagtgaggcccttcccacctcaacagataaggtgaacccatccctgctcacctggtgggattcaaaatcagatctgaggaggaatccaaagacccgagcaggcgccctgaagctcctcctccaccggtaggagttggctcaaggaggtcctgaggacaggactccgggagtgcggccctggggtgcctacagccctctctcccacgtcgccgcctaccggaccggggatccagccaccgccagggttgcagccaaaggcccctgcctctgcgctgccgccattgcttaaaggggcttcagcctgacttccagcagcggagcgcgagtcggcctagccaatgcgcatgcgcgaagcgccagccaattctcccatcacagtgagtcccacggttgcctgagtaaccactccctgaggcttggcaaagcaggagccctccatggcagtgcttgggtgtcggggctttgaggctctggcctgacctctccacgggggcgacaggaaggtctccggatgccaggagtctccaaggactgaccagggtgacaaaaccacaggcagagtccaggggaagcagtgcggcatccaagcctcaggcctgcccggacggggatcgggtgagcctccccaaaacttgtgcaggccatgatcttgaggacaggtctgcctgtgtgtccataggctcctgtctcatcccagtgtcgatctcgtggagagcagaaccccaaagcctcaggggttgcctggggctgtgtgtttctgtgccactgctgtatgtctgtgtgtgtgtctcccattctctcttatctctctgtctctcactctctgtctgtttctctctctctctttctctgtgtgtgtgtgtgccagtgtgggtgtgtgtgttgggatcaatgtgccctgtgcgccaaaaagcgatttcttgcatgtcaacctgtttttggtgagccttttttttggtctctgcctgggtcatgtggccggttgtcaatcgttttcgtggtggttccactttgggattgtgaaggcctcgaccacatgaggagatgcgtcggtcccggagcaactggaatctcatccccatcctgagcggcttttctagaatcaagatgaccacacttcagccaaggaccaaagcctcataggagctcattctcctgcaggaggggagcagaccgatgtcaaaggagatggttgtatctcctcgcggcttttctctgagaaatgaagccacaccacgatacagtcttaaagaggaagccaggaaccggagatgacaacaatacctgctgtcactggaatgctggcctctctggacaagtcacccatttgacactccttcccttaaccctgtcggtgacactgtgctgtgtcttgcctgggatctggcctctgctctgtcctccctcttgctctgtctctcctgtttctgaggggcctagatgcttcttggtctggctcaatgtcttcaacaaagaacacttcccagtccatcagggagaaaattcgtggagatccgtgtcataattgtttctctctccaaacctgtttctggttgattcggccggtttgactatcctggaactctgggcttccatacctgtttcagacagggaagctcccttggtctccaagtttcacctcatggctgggtggattgcctagaatgagcggtaggcgatcatggctggccttggcgtctaggaaaggccgtgcggcatttcctctgcacttcctgtcttattattgagagacatcctcccctctgcttctggatggactgcctcccagaactgaatctttcagctctcacaaatgtcagggatccaaagggcaagggctggggctgggtgcaggggaggttgcctcagggctacctaggctgtggaggggtgagggtggggtgaactatgcagaaacctctccgctcctagagcaggcatcccaaaatctggcttggattcaggcacgggcccattcctggttctcagaggcgctatgcttttccttggcgttgactgggaggtcatctgtgtccccccgcatccaccgggcacatgcccagacaccattgttcgtctcgcaatcaccccatatggcctcggtaatgcacactcacccaatctgctcttagggaagccagtgccacgtgtggtctcattggctctacctcggactcgccctatccctgtttccacgtctcctggaaagtggtgttggcttgcagcagccccacggctttgcgaatcggggcagcccacagctcctccaagggagaagggaggcagagggctcgtgggtcagcgaattttcagctgataccacgccttgaggcccaagagatcatcctgtgctgcagcgaggccctgcctgcctcaccacatgcctcccgcctgagcccatccctgctcacccagtgggatccaaaatcggatctgaagaggagtcctgagagcccagcaggcgccctgaagctccccctccaccggtggaagtcgactcaaggaggccctgaagacaggactcctgggggtttggccctgggacgcccgcggccccctctcccacgccgccctctactggaccccggatccagccgccgccgcggctgcagcaggagcttccctgccttagcgcagccgcgccgccgccattgtttcaaggggccgcagcctgacttctaggagcggagcgcgagtcaaccccgccaatgcgcatgcgcgaggcgcgagcggattctcaccgttgtcttagaaaccagtccctgaggcttggcaaagcaggagccctccgtggcagtgcttggctgtcggggctccgaggctccggcctgacctctccacggggtcgacaggaacgtctccggatgccacgagtcgcacagagctgtcgaggatgacgaaaccacaggcggagtctgggggaagcggcgcggcatcccaggctcaggcctgcccggacgtgttagggtgagtctccgcaaaagtcgtgcccgccgtgatctcgaggacaggtctgcctgtgtgctcgtgggccgccctctcacctgagggtcgttcttgcggagagcagaaccccgcagcctcaggggttgcctggcatttctgtttctatgccactgctctgtctctgtctctttctctctctctctctctcactctatctctgtgtgtgtgtgcgtatgtgtatgtgtgtctgtctgtgtcccattctcttttctctgtctctcacttcctgtttctctctctccctctgtctgtatgtgtgtgtgcccatgagcgtgtgtgtgttgggacgtatatgccccctgcgccaaaaagggatttcttgtatgtccgcctgtcgttggcgagcctttttctgcgtctgcctgggtcacgtggctggttgtctcgttttcgcggcggttgcacttcgggtttttgaaggcctccaccacctcaggagatgcgtcggtcccagagcaactgaagtctcatccccatcctgagtggtctattctctagaatcaagatgaccacactccaggtaaggacaaaagcctcccaggagctcattgtcctaaaggagggaagtagaccgacctcaaaggagatggttgtatctcctcgcgtctcttctctgagaaacgaagccacaccacgatacaatcttaaagaagaagctgggatggggacacggcaaggatccctgtcactggaatgctggcctctttggacaagtcacccgtttggcactcctcccctcagcccgtggcggtggcactgtgctgtatcctgcctgggctctggcctctgctctggcctccctcttgctctgtctcttctgtttctgaggggcctagatgcttcttggtctggctgaatgtcttcaacaaagatcacttcccagtccatcagggagaaacttcatggagatccatgttctgattgtttctctctccaaacctgtttctgcttgattgggtaggtttgatgatcctggagctcttggctcccatacgtgtctcagacagggaagctaccttggtctccacgtttcacctcatgtgtgggggggattgcctagaatgagcggtaggcgaccgtgactggccttgtcttctaggacaggcgctgtcgcattttctctgcacttcctgtctcattcttgagggacatcctctcctccgctccggggtggactgcctccctgaatcttttggctgtaatgaatgtcagggaaccaacgggactgggctggggctgggtgcaggggaggttgcgtcagggctacctgggcggtggagggttgagggtggggtgaactttgcaggaacctctttgctcctccagcaggcatttcaaattgtggcttggactcacgcacaggccccctcctggttcccaggtgttctatgattttcgttggcatcgatggaaaggtcacctgtgccccccttcctccggaacatgcctggacaccattgtttgtttcgccatcgccccgtatgccctctgtgacacacattcacagcatctgctcttgaatacaccagtgccacgtgtggtcacactggctctactttggatttgcccctttccctgtttgcacgtgtcctgcacttttaccagaaggtggtaaaagtaagagaagaataaaattttggacatgtaaaattcatgtcttctatagagtaactgggtaaagatatccatcagactgttatatatgctcttcaggagctcaagtagggattgtattgcaaatgagtaatttgatatttatcagtgtacaatgatgactgaaaccattatagccattgcagtgtggtgtgataattcactgatgctatgcggaacaggatatcaagcaggttttggggacaagtaccagttaagaaacaagcaaagaaaagaattcataagtggaaaattgtttttaagtgataattataattagcatcatgagaaaacaatatgatgaagccaaggaaaatatttaagatgtctttttataaaagagccatgatgagcagattttaactttgcctctcataaaaccaattaaaaaaacttaattttcaaaggaatgtaaaaataagggaaaatatcttaatttgggatagaaataagaaattgaggcatccacatatcccatattttgaggactttcttacagaaacaatacacgtaagatgagacggaaatcaccaagacttgggtcatgagtttctgaggaagaaatgaggcaaacgttaattcaacgtttaatggtgacaatcattgctctgagcaacttaacaactctttaattctcaaaaaactttcatctatgtgtttagcctcacttttaggtcataaaactgaggaactgacaatttcagtaactataatttgcgcatgtcacacagaaagtagtggaatgagaattgaaatctacatcttataacctctaaaatatttgcttttaacctctacactgttagaagtaactaactggacacatggacagaatagttgtgtgtttgttttctcctcagatgtggagaatcatgtaagtaaaggaatgaggcagtaaagaaagaactgtgtaatatatttaagtgtaagtattaactagtggggaagggttctagaagtcataggaaagatgggatgaaaaacagaaaagacattatatttaagaggaggaacatctcattttttgagaccagagtaaagaagatatggagagggctgtggaccacaagtttaaaactttgccaaagtattttacttcgtgtccatgaaaatcttttattttcctctgagaaattaataggcttttttatgaaagacagtgcaaactatataatgaattttgttaattttagttttatgtcctaatttgtttttcctatgaaggccagattcaaatttgaagcttaattcttaatgaacttatttctgtatatttctaattgaaagtttctccttaatcacttatgttttcctaattttgatccacttagggttttccatcttttgttgagattattgttatctacttttcctgccttatagaataagataataaaataaatacatcatttaaaactcacgtaggacttcatcatttcttcttcctgggagacagcagaatcctgagatggccaaggtaggggatgggtgaaaaaataagccatcaaaaaccccacttgcttagcagctctaggaaaggcagactaggaatctccagttagttaagatcatctggaggaactttgtggggaaataatcttaaagtctatcaaaaagccaagaataactacactgtttgcaggcaccaatatgtacaagcatgactgacgaaatcctatggagcttcaatatggatttttaaacattatttctaaattaaaagtataattcagaagatatttttaagctagctgcatacttcactcttcgatctatccatccatccatccatccaatcacaaacttacagaaagttgcaagtatagcaccaggaactttcttgttactgaaccatttgaaagtaaattgttgacctaatgctacatcacccctgaaacaggaattaaaagaaattaaagagtgtgtaagcaaaaactcaattgtatgtgagaaaacccaattccccctgagaaacagaaagagctggagtcctttaaaaaattaactgcctgtttttctgtggctagtgagctttatctctccctttcccaggcattgtgaagacccggtttccctagctgtgcagctgcaaggtcactagacagataaactcaagtcgcaaaacatgtttttccttgaaaagtaagaaatgatgtaatgcatgtctcacttgcataagtgcctttgtttctcgcttctgtagtatgcttccccctgcatagatctcccccctcccccgcctacccccacccgacgaaatgcctaaaaggtaatttaactctttgttcagggctcagtcctttagatgttaatccgactgtgcagttaaataattaataaatatcatatcctcctgaaccccatcagtcgctctaattccttaaagatcccacaacatccctcaaaatgctgcatatttcctacaaaaaggacatgcccctacctacataaccacaatccaattaccaaaataaagaaattaacatttatttgttatgaccatcgatatcagattcaagtgttgccaattgtgccattaactggatagcatgaaaggaacaaatttagaatcatgcattgcctttagatgtcatgtctctttaatctcctttagtctgatacagtttctcagtcttgcccttttataaccttgacactttttattattataagccagtctgaagaatttccttccaatttggttttctctgatgtttcctcatgataaggttccgagttgtagaaagaatgccacaaaagtgatgcatgctcctatcaggggcacatgatgacattctatcctattactggtaatactccttgatgaaagagcattacatcttaatcactaagatataccagccaggcttctctactgtaaaattactctttttttcctttgtaattagtaaagattttatggggaggtactctgagactatgtaaacacaccattcttcatcaaactttcaatttattaatttatgtcagtatagacttgtgatttcctatttcattcagaggtttgtaatctattattacttattttaatgaccagtttgctccagatttggcaagtgggagcccctcctgtgtgggttttgcggcctttaacaggttcctatcattctttgagcgccccttacttacacatataaaagatgttccaggctcatcttgtatttgctgtgcccaacactggaatcaatcatttcttcaaagaacgcagatttttatcagaggaaataataatagtagtaaaatatatattttatgtgtgtatttatgtatatgaaacatatttgatcagtcccccctagaagaagccactatcccattactgccgccatactctccctggatagatacctcctcattgtgctcaagctacagtgcagtgctttaggcctaagtaactgcaccggcatgtatgcctagcttgctcagcccctaatggatttaggattacagtattaggaagagaagggaaaatgaagaatctttcctgttggggtgatcagacccaacaccaggtcgtgggggtgacaaagtccggcggagtcaaaggattgagaaaaagacagtttgagagagaaaagtgggaccggacccagggggccatcacaatcgtagaggctgcgaaggcccgagctctgggagcccatgctatttattggtaatccaacaaagaaacaggtggtgagaatgtggaggtcaaaagggcacattgcattaagtacatgatttacagctgtgatggtttagcatttgctctacttgagataatggagagcagattcttttaactcaagatacaatcaatcctgggagagcaaggagcaaggagccagcaagtctagatacattccagagccatgagccctggattctatccaagccacaagggattttatgccctgggcttagattatggtgcatgatggtaggcttccaccctttagcatagagcttggtgttccaaaggccacaaggggttttagaccctggaccccggacatgttccaagactcttttacattatgtcagacatgcaagccctgcctcagcttctcctaaccctcagctttttcccaacactttcccagctggatcagagagatgcaatgtttgaaggacttgaccctctattgctggcttttgagatggaggaagggggccgtgagccaaggaatgtggcagcctcttgaagctgggaatggcccttggcttacagccagcaagcaaatggagacattggacttacagatgcaagaaactgaattctgcctattaacctaaatgagtaggaagcagattctccctagagcctctagaaaataatgcagcattgctgccactttaaatttagttcagtgaggtctgaacttcttgacctacagaactaaaagctaataaatttgtgttgttttaagtcactaaatttgtggtaatttgatacaagaaaatactcgtacagtggtcacttaattttcaataaaggtgccaaagacctccactgttgaaaataccatttgcattttcaataaatggcactagaacaacttgatatccatacagaaaaagaaataaatgaacttcaacccctacctgccaccatgaacaaaaattaacataaatcctagaactaatataaaaagctacaactctaaggcttctagaaagaataaatatgtaaacatatttccaacctggcagtagacaatttgttaagtcacagaaagcaaaactgcaaaagaaaaagaattgacaaatgttatcaaaaatgtttttcttactcatcaaaagacactgttaaaaatatgactaagaacatttataactcggccaggcgcggcggctcacgcctgtaatcccagcactttgggaggctgcggcgggtggatcacctaaggtcaggagttcgagaccagcctgaccaatatggtgaaaccccgtctctactaaaaatacaaaaattagctgggcatagtggcatgcgcctgtagtcccagctactcaggaggctgagacaggataattgctttaacccgggaggcagaggttgcagtgagccgagattgcactccagcctgggtgacagagcaagagtctgtctcaaaaaaaaaaagaacttctataactcaacaataaaaagatgaacaaaccaattaaagatgggcaaaaattttgaccagatacttcacaaagaaagatgttttgccaataagtacataaaaagtgatcaacatcattagtcattagaaaaatgtaaattaaaaatactgtgggacagtaatgagatatatagccagaaagacagcaccaaatgttggcaaagaggtagggagactgaaactctcatactttgttaatgggagtgtaaaatggtgcaatccctttgggtatggtttgacagtttcttataaaactgaacatacacctatacactgtgtctgaacaattccattcctaggtgttaccccagagaaatgaaaacagatgttcataaacagacatgtccaagaatgtttatgacactattattcataatagccaaaaacttggaaatagcacaaaagttcaacaagaatatgaataaactgtgatacaatcatagagtggaatacaactcagcaataagaactattgagtataccacaaacacccacacatacaacatggatacatttttaaaacattatactgagtgaaagaagccttacatacaaaaaacacatatttcaatcccaattatacgaagttctagaagagacaaaaattaatctacaatgggaaaatatcagaatggcagttgtttctggatatagagtgggaaatgactaggaaggagcatgaaggaactttctagggtgatggtatttttcttcactttgacaggattttggtttgcacaagtatttgaatctgtcaaaattcttcaaatggtaaatttaagattacacaattttactgtatgtacattttacctaaaaagctgtaactagatattgaactttagttagtggtatgcatgctaaagtatttaggggtaaagtatacgatgtctacaactaactttgaaatacaacaaaaaatggatcaattcatccttatggatgaatacagggctggatacaaggctaattatttggtaaagcaaatacagcatgatattcattatagtacttagatagcgaatgtatgggtatttttgtacaattcttttaatttctacatgtttggaaattttcataaaatggtgaaaatacaaaactatcaacttataattctacattcagcaaaaatatctttcaagaattagaagtttttagacaaataaagacagaagttttcaacaatagatcctcactgaagaaaactgtgatagatgcacttcaggtagaagaaaagtgatgcaagaaggagaggtaagcaaagaaagcagtaaactggtgtgtaatcaaacactcagctcataaaacataataatgtctccatatgtgtgtgtacattattttggtgcttatgtttacaatataatttagcaggatatacttaagttatcaaagtctaaatagtatttttatttcctgccaatgacattggcatacttcaacactaatcacttctaccaacttaaaagctattgctgtggtatttttaaaatatatattagtgtgtgtgtgtatatatatatatacacttacacacacacatacatatagatatataaccagattataccacaaagatagcatgtaggttggtagaaacaatgcttggtgctaaagtattctaacatcattattttgctgggcaggaaaaatgttttgttcacacattgataacttaagtatgtcctgttaaatattttgcaaaagtactaaaataatataaatagaatgcatattaccccaaagagtagcagaaaaggttggggagggggaaccaaactgaagaaagaataaaggaaagaaatgaaacattaaagttacatatacatcacatcacaaaataaaatcatagaaataaatacaaatggccgggcgcggtggctcatgcctgtaatcccagcactttgggaggctgaggcgggcggatcacctgaggtcagcagttcaagaccagcctgaccaacatggagaaaccctgtctctactaaaaatacaaaaattagctaggcgtgatggtggactcctgtaatcccagctactcgggaggctgaggcaggagaattgcttgaacccaggaggcagaggttgtggtgagccaagattgtgccattgcactccagcctgggcaacaagagtgaaactctgtctcaaaataaataaataaataaataaataaaaatatgccagtacatctctgattggataaataagtaaaatgtaactaaaatctgttttcaagaagtatattaagggaagcatatagaaagactgaaaatgaagaacagaaaaaacatttggaaaatactaatcaaatgaaagctagtgttgtgatattagtgtcagataaaacagactagagcattattataaagtgatcactaactgcatcatgatgaaatgttcaattttccatgaagatataaaaattgcaagcttaagttactaaaaatacacactataaaccaaaaattaatgaaactacaaggaaaaataaccttacagatatggcgagatattatacatagttcttttagtaaatgatagataaaagagatacaatcagtaagattatagatttcaacaaaaattacaactttatttaatggctatgtatttttaaaacagttactattatacacaatagctgcaaaagacaaattctcatcaaagacacactgaatatttagaaaacttagacacgtattagcctatcgggcaaatctcgaaaactttcaaaggactagttttatataccgtactttcactgcccacaaaagtagctatgtttgatatatgtcatcaaaggaaaattagaaagacctatatagttaagaaatataattctaaattatttatggttaaaagaaatcatagtagaaatttaaaagtatttaaaactgaatgatgagattactacttaatatactgatgctcctggactcaatggggttatgccctaataaacccatcacaagttgaaaatatcattaagtcaaaaatgcttttacctaacctaccaagcatgacagcttagcataacctactttaaacatgatcagaacacttatattacctaccagttagatgaaatcatctaacacaaaccctattttataattaagtgctgaatgtcttaatttattgaatactgaactaaaagtgaaaaacagtattgtcgtatggatatttgaaatacgtttctactgaatccatatggcttttacaccatcataaagttaaaaaaatcatagaaccattgtaagttggagactgactgtatataaaattctgtaggatgcagctaaagttggacctcgaggaaaagttataaccttaccagtttatattagaagtgtaaaaattgataatatctagcatccagcttaaaaatgtgagaaaacaatggcagaataaatccaaggaaagtgaaagcaaggaaataataaagaccaaaacaatacaagaaatagaaaaatagttatattatggagaggattaataaagtctcaaatagatttttgtgttatatcccaaaaattattataaaactgctacagcatggaaatagcacagggaacaaattgaccaatataattgaataatgaattcccaacatatgtgacacatacatatgtgttgtatgtcccatacacatataataatccaatttatgactactgataagtgaaaaagttggtctttgcatattctgggacaactggtatatgcacacatacataacacagaaattgtatctctcctttaacttactacagagatgaattctaagagattttataaaaaaaattgtgaaaggcaaaactataaacctttaagaagataatatatgaagctaaatttatgactttgatatagagaaggatttcttaaaatgcaagaaagtacaagccatagagaaaaaaattcataaatctgacattaaaacagagaatttctatttgttaaaagatccctattgtaaacaaagacaagctataaactgggatattttcaacacatatagttgatacagaataaacatccaaaatatttttacaaagtcctataataataaaaagacaacccaaagaaattgagcaaagggtttcagtaggcatttcacagaagaggaagggccaataaacaagtctttaaaatcttaaccttattagtaagcagagaaatgcaaattaaaaccaaaatgagattctactgcatatacatctaccagaatcacctgaacttaaaattctgagcatttcaaatgttagtaaagagtatacattggaaaatcccctttggaaaatattgcatattgcctagtaaagttgagaatatttgcatggtatatgtactctgtgttcagtaatatattcttcatatatatcctagaacagggcttagcaaactatggcccacaggctagatcctgccttggcataaagtttcactagaacacactcgttcttttacatattgtctatggctgtgatttcatgatacaatggcagagttgagtagttgtgacagaaactgtatggcccgcaaagcctaaaatatttcctatatgtccctttgcacaagaaagtttgatgacccttgccctagaacagcctctgcatgtccatcagtaaacatgtacaagaatgttcgtaatagaactataaattcaaactttgaagcaactcacatttctatcaactgagaatggattttaaaaactgtaatatagtcaagcaatggaatactgtaccataaaaatgaatggattatagctacactacttaatctcaggaacataatgttgacaaaaaagcgagtcacagaatgatatatgaaatagttatataaaactcaaaaacatccataaacaacatagttttggagtaagtagctgaaactataaagaaaagcaagagaattataaacataaatctcaggataattgttatgtctgaaggaaaaggggatagaaatgggaatagatgtctaggagtcttcaaagttagtagttaatattttcttttggctgggcgtggtggctcacgcctgtaatctcaacactttgggaggccgaggcaggtggatcacctgaggtcaggagttcgataccagcctggccaacaaggtgaaaccccatctctactgaaaatacaaaaattagctgggcatggtggtgcgcacctgtagtcccagctactcgggaggctgaggcaggagaatcgcttgaacccaagaggcggaggttgcagtgagctgagatcctgccactgcactccagcctgggcaacagagtgagactccatctcaaaaaaataaatattttctttcttaaaaaaggtagttggtacacaggtttttgctgtattgagaattaaaaaaatacatatacttcataaatattattttgtatctactctatatttaatagaaactatctttgaaacatacgaatttaattaaaagacagggtgaaggttaaattcttttggtaggtcataataaagtagactcaatttcctccaatggactggagcctctaaggcaaatactcgaataacattgtaaaatatgatttctgttgactgaaaaactgggcttgaaaaaccaacggtttcattctacctgattcttcctccctcaccaagactctttcatttcttttttaaccatatctttctttcccattatctgataaggaaattataatgggcttaaaaacttagaaaccatcttgcatatcgtaaaagataagaaattggtcagactctggctgtggaattaagacccatttccatggttgtcagggaagcaaggccatcctaggaagggctaaagaaagctacaatcagagttgcctccacacgattctgcaaagctctaattattttctgagaacaagggacaaaaattcaggcaagcacacagaatccacaggattcacaaaggaagaagatactccagattgtaaattttaatttgggggagaagatgtccttccctagccagatagattcttctagtttccaatataaaatctgtaaataatctctctgaattcagttatctctactccttttaggaaaagtcttgaaggtcactggccactgcaatgaaaaattgttaatcacacaaagccagggtcaagattcatgacatagatggccattgtgaatgaggaactattcatatatatttcaggattctcaatccaacaacagtagaatggttaaaaaggattatgatgatcaatagacactatgtaatctttaatatgttccaattaaaatacatcatattaacaaattttaattttgtaatattcaaaatgttttctgtcattatttcaaaatactaatgatgtctttttaaatattatgaacatttaaaaggtatatgcattttattgcaatattttgttttaaaacatgaaaaaaacagattacaaaatagtatgtagtaagtgatgtttttgatatgactgtacaaatatttaatggcatttgaaaagatatgtgtttatcttttgattgtgataccactggtggttttaaaagttttcttttcctagggctggccagggtggctcatgcttataatcccagtactttgggaggctgagggaggttgacttgaccctaggagttcaaggttaccatgagccatgattacaccactgcactccagcctgggtgacagagcgagaccccatctctttaaaaaagaaaaatgtcactgacataatactgcgtaaaattttaagattcattttgttaatttaaaatttataatcctaagtttattggatgcataacattctgctccctgtgtactataaattacttaactatttctttgttgagaatatacattgaaaagatcatctcaaaaattctcctcacaaagtggctaattccaagtctgggacagggaatgcacaatataagtacgaaatatctgtgccaggttgggcgtggtggttcacacctgtaatcccaacactttgggaggcctaggcgggtggatcacttgagatcaggagtttgaggccagcctggccaacatggtgaaaccctgtctctactaaaaatataaaaaaattagccgggcatggtgacaggtgcctctaatcccagctacttgggaggctgagacaggagaactgcctgacccgggaggtggaggttgcagtgagccgagccgagatcatgccactgtactgcagtcttggcgacagagcgagactctgcctgaaaaaagaaaaaaaaaaaaaaagaaaagaaaagaaagaaagaaaaaggaaaaaaaagaaatacctgtgtcaaaaagtaaggaagtgctcaaagacaaatggggacacgggcaccagcgtcaggggttcttacaggccaatttggaacaatttgagcaacacagaggatgataacaggctaaagtactttggacaaaaaataaaaatccatgagccatagtgatattcaaaagagaaaaaataaagaggtatagagggaaagggtggaaaggcaaagctcttttatatacaagaaggaatggtaaaattaaaaatcaccattttgcaactcctaacttaataactgatttagacaagaatcattaatgattattaaaaccatcaggtaaaaggctatttgggaaatggtttcaaaatatccccatcagattacttcttagcctcaaagaaaaaaaggtatttttttaccatgaagaaatcaggtgcacatctccttgaaccaaagtaataaaatttagtatcattggtaatggatcaaactgaaattatgtgtcacttaatatgatgcaataggaagaacacaccagcattcatagttttcttgccaaatatatttaaacttaacctaattatgacagagcaatcaaacaaatccagaatgttaggcattctacaagacaaatattctggacccttcaactcttaaaaaatgtcatgaaatacaaaaacaggctgggggaatgctgttctagattaaagaaattaaaaagataggcccacctactgtaatgtgtgaccttaattgggaccaggatggatattttaaatacacatatcagacatttgggaaacactagggcaatttaaatgtggactatatattagataatattatgaatcattgttaaaatttatatgtatattcatgatatcgaggttatgcaggagaacaaccttgttcttcgagatgcgtgctgaaatcctcaatggtgaaatatataatatctgcagcttacccataaatggtgaacaaaaaataaacaaaaatatgtaaatacatgcagacagagattaagcaaatggtccaaaatgttaaaaactggtgaatctaagtaaaggatacacagtgcaaatcattattcttttaattttcctgtagctttaacatttttcaaaataaacacttagggaaaagtaattatatcagagtgcctcagatacttttttgggattgctgattaaatgctagactcatacgtactggcataaacctaatctgttggaagaagttcaaaatcatttgccaacatcaacaaagactctcaaagaaaataatccagtgccaggaaagagaacatacttaccaatgctgtccagggtcagacactataacggagctgaatccagtaactgggctgaagagataactaatccttaaaggtcagcaaggtcaaaatgggttataaggacataaatatgaaactggcatttcataaacaaacaagacacctcaggcctatgaaaacttgttgccttactattcccttctctctgcagtcttcctaaggtgtaagtttttctggattttgtctgcttccacagtttaggttccttggctcacttccttgctccaaaaccaacgtctctattgacttttatattttaaaattaaattttaaatatatgagtgatgctaccttgctaaaagagagagagaggccgggcgcggtagctcacgtctgtcatcccagcactttgggaggccaaggtgggcaaatcacgaggtcaggagttcgagaccagcctggctaaaatggtgaaaccctgtctccactaaaaatacaaaaaattagctgggcgtagtggcaggcgcctgtaatcccagctactcgggaggctgaggcaggagaatcacttgaacccgggaagcggaggttgcagtgagctgagagcgcaccactgcactccagcccgggcgacagagtgagactctgtctcaaaacaaaaacaaaaacaaaaacaaacaaacaaacaaaaacagagagagagggagagaaatgacctataatgcttaagttccctttgacatttacttctccccctttaccctaaatcctctcttctctccctaaaggttaccattagcaggagttttgtgtgtatccctctataaaatatatactatttttatactaattatatcacatagtattctaacaaatccttctcagttcctgcagtctacgtttctgatggtcttaaccttttttagcttaaagtacctctttgtgaatctgaaaagctgcctatactttttttaaaaaaatcacatatcaacacatataaaatgtcataagtttaatatacaagaagcccatccacatggaatctattcatctcaggtgaacaactgttttttacttttaagtgatagcttcctttttcttgcaagcactcatcgtaactattcaaaagccaaaagtagtgacccagaatcacacagatgcggctcaagatcaatgcatgctgttcaatttgaaaccagaatgtgtctgtcacctcctaaaaaaaaaaacaaaacccagtatatatctcccatatataattggacataattcttttttatttttatttttatttatttattatactttaagttctagggtacatgtgcacaacgtgcaggtttgttacatatgtatacatgtgccatgttggtgtgctgcacctgttaactcatcatttacattagatatatctcctaatgctacccctccccctacccccactccctgacaggccccagtgtgtgatgttccttaccctgtgtccaagtgttctcattgttcaattcccacctatgagtgagaacatgtggtgtttggttttctgtccttgcgatagtttgctaagaatgatggtttccagctttatccatgtccctataaaggacatgaactcatccttttttatggctgcatagtattccatgatgtatatgtgccacattttcttaatccagtctatcattgatggacatttgggttggttccaagtctttgctatcgtgaatagtgccgcaataaacatacgtgtgcatgtgaattggacataattcttgcctgactttgacccactctaactcagtgcaatttaattatctatatttcacatagctatgcctgatcacacacacaggttcattccctcaagaattctgatcaccaaatttgctattccagtcacattaccggtaagagatcaatgtatttgatatatggtcttgcaagaccaagttttattaatttttttccctctgaaggagtggtgaaattatactctatcttctctgtgctggaagttcacaagtttttgattattcaaaaatcataaaaggccaagaggtcttgaagtaagtaaaaataagttcaggtttaccaacaaactctacagccttaagttactttctgccggccaaggttttctcatcagaaaatgaggacaagtgtttgacctagaatttgggaaatctgactagtgctgtactgtgctaaaattcactcttcttatgtataacgttgttttattattttattagttgatggcctctcaaccgtacccagtaataagagaaactttaccctctaattagaaaataatggatatctacttttggcctgctgtggcagaggaaaaggcagttaccctaggactggttttgaaataatctttctaaaaacaaagaaaaaactacgttaattttggattcttcccgataacacatatatttgatccaatagaaaaatgatgtctaaattacttgtcagataaattgattatcttttccagattattacattactatttaaggaagaaataacttggccatagtattttcactgtcacacacgatcacacacagctcatttgctcttggcacccttacagacactgaaatacaagcacaaagaaagcacgtttatataacacagatcaccagttactcaattacggccacacacaaaaaagcagatatacatacagatacccttcataagcaaaccacaatagagatctgtgtaaaatcgtcttactctgttagacgattctacacagttataaaatcccattactacgcagcttaaagtacaaatcacctcacaccccacagcaggaagaatcacacacaggcagaaacacaaccatacacacccggccacggaaagactctcagtccacctggcatctcccattgtcacacacaccccaagggcctgggagggcacacacagggtcctctgcaaatccgaggttccggcgggtccccgcaccggccccagctcctcccccgcacctgcctggccggcgggtcccaccctctctcctgccaggggtagaccctgggaccactcagctcgctctcgcaggccctgagcgtctgacgcctgcgcactgagcgcgggcgggcgggcactcccagaaacctccggggcgctgcaggcgggacaagcaggttccacaggccgagcccacgagcccctcgaggggtgagcggcccgggcctcctggcgttctggccggctagccaagcgctggactacatttcccagaggcacggcgtccggagcgctggactacatttcccagaggcaccgctcccggagcgtagcttcatttccgttagtttgcgagatttggaggcctcgcgtggggagagggccgcgtctgtggaggagcttggctccgcacctgctgggctggcgaacccgaaattgggcttggaacccgggagccagatcttggaccctgaactgcacctctgtcaaggtaggagtgtccgggatgccggagcggacacgcgcggagaaagcgtcgctggggttactcgtgtggccgtgtctccggttttgtgtgcaggctacagcctgcctggtattggcgactgcctgtgcatacacgactggacgtgtgtggctgtggttttgtgtatgagcatttgtatgagtgtgagttgtgactctgagggtgtttgtgactgtttgcttacctggctgggatatacttatgtgactgtgattttatgtgtgccgcgtgtataattggggtttgcctgtgactatgaagtgtgtgacagttgtgacaagagtgtttggatgttcttgtgtcactttgaggttgtgtgtaaacctgatatcgtgggatggatttgccagtaaatttaaggtgtgtgacagtgttgctgtgacacggtgtttattaccgcgtgtttccctgatttcgtactgggttgggtgactgtctgattgtgtgtgactgtggggttgtgtgtgctgttttcatgactgtgtaaagagactaaaattgcagctttgaaagggtgtttttggcggtatgtgtctctgacaaggtgcttggatgtaattatatgccttgtacttaatgggattttgtttgagacaaggtggtctaacaatgtagcataattgggtgattgtgcctctagctgtgtaactgtggaaatgtgattatgtgtgactttatgtggccatttgtatattctgtgaccttatgggggtttagtccagtacagaagtaaatttctttttggtatttctggggttcatttggggctgaggtctgcctatggattgtgagtcccatgtggctctgtgctcctcccatgtggctctgaggacttaaggactttttgatttgaccacagtggctgccctttcatccatggcctgtattgcttcatttctgtatccatcctcggttcaccttgggaaatgtagttacttacgagttcacgacttcttccctgcgtcctcttgccttatagccttaaggggattgggtgcagggaagtggcaagaagtaaggaagtcagacatttggacacctgagtgatgaataggagttatttgcaagttacagacctggtcttaggatgagaattttagggctgataataccttcaagacagccactggatgctgtgcgcggtggctcacatctgtaatcccagcgctttgggaggcagaggcgggtggattacctgaggtcatggtttcaccatgacctctactaaaaatacaaaattagctgggcgtggtggcgcatgcctgtaatcccagctacttaggaggctgaggcaggagaattgcttgaacccgggaggcggaggttgcagtgagccaagatcaagccactgcactccagcctgggcaacaagagtgaaactcattctctaaataaataaataaataggccactggaaatataatgggactccaggagtgggaatagtttcagagggagtgctttaggagacagccacccagttctgaacctgaagcaccccactgcaggactgtctccagtgtacagctttgaatacagaaataaattcaagcccaagacagctgtgacctggcccttctttctgatacagaaggtagaagacttattctagtctcctcctgacttttctttatgttaaatgagattaagaggatggaggaagagggtatgttataatttagcatattccccaagaaaggcctaatatctcattccatttttctttttctgagagtagagcccagaggagaaagaatggctgtttcagtagcaatgtccaaggtgagtatttcctctttgtttcctgaaatacctttgttattacaggacatagacatttttgttttctttttgaaatttcttgccttctcaaatgatagaggggcaaggcaatttttggtagattgagagcaaagaaaatgtgccattaatcgggatagatgcttccccaatagtggttaaatttacgaagaatggatttgagactcatggatttaaaaaggggaagagagaaatagctctattgtgttatttaaaaagggaaagagctctattgtgttatttctgatacagcaccattttgattttttaactttttttagcttgttatggaaagtttcaaatgtacacaaaagtataatgaatatgcctagcttaaaaacgatcacggccaggtgtggtggctcatgcctataatcccagcactttgggaggccgaggcggatggaacgaggttaggagatcgaaaccatcctggaaaaaggtgaaaccccgtctgtactaaaaattaaaaaaaaaaaattagttgggcgtggtggtggatgcacatagtcccagctactcgggagactgaggcaggagaatggcgtgaacctgggaggcagagcttgcagtgagccgagattgcgccactgcactccagcctgggcaacagagcgagactctgtctcaaaaaaaaaaaaaaaaaagcgattactttccaatcttgtttcatttattctaccttcagttcaaaatcctttctaatttgcccctttgatttcttgacttataggttattttgatgtgtcatgttttcaaatattttgaggatcttccagagatcttttgttactgatttctaatttcattacattgtgttcacagaatatacttcatatgattttaatccttttaaatttattaagatttgttttatgacccagaatttgatgcatcttagtaaatgttccatgtgcacttgaaaagactatattctgtggttgttgggtggagtgttctataaatgtcaactaggtcaggtaggttgatagtattttttaaatcttccatatctttactgagtttttatttgttggatttttctccttgtagtttctttcagtttctgcttcatgtattttttttttttttgaggcagagtcttgctttgtcacccaggctggagtgcagtggcccaatcttggctcactgcaacctccacctcccaggttcaagcaacctccacctcccaggttcaagtgattctcctaccttagcctcccgagtagctgggaatacaggcgggcacgaccatgcccagctaatttttgtatttttttttttttttttttttttttagcagagatggggtttcaccatattggccaggctggtctcaaacttctgacctcaggtgatctgcccacctcggcctcccaaagtgcagggattacaggtgtgagccactgtgcctggcctgcttcatgtattttgatgctctgttattaggtatagaaaggttttagatttttacatcctactggtgaattgacccctttatcattaggaaatggtcttccttgtccctcataatattctttgctccaaacatctactttgcttgatatttaatgtagccattccagctttcttttcattaatattagcattgtgtgtctttttctatcctttttcttttaacctgtttgtgtttggtatttcaagtgcatttcttacaggcagcatgtaattgggtttgtgtttttattcaatttggcaatctccattttttgttgttgttgttactgttgttgagacagagtctcactctgtcacccaggctggagtgcagtggtgtgatctcagctcactgcaacctctgcctcctgtgttcaagtgattctcctgcctcagcctcccaagtagctgggattacaggcacacaccaccacacccacctaatgtttttgtacttttagtagagacggggttttgccatgttggccaggctggtctcaaactcctgaactcaggtgatctgcctgcctcggcctcccaaatttctgggattacaggtgtgaacaaccacacccaaccagcaatctctatcttttaattggagtatttagtccatttatatttagtgtgattattgatatggtttggttcaaatccatcattttgccatttgttttatatttatcccatctgttctttatttcctgttctcccttttctgccttcttttggattgagacagagtttcaaaataacaataccaatattttaaccaaccatatgaatatagaaaaacaacataaagtcctgttggagtttgacaggatatagcccactagggatctataatcaaattactgtgtttaaaagtcgtctacaataacacttctcgtatggttaagctgccagctggaaatgcagttatgctcatttgttttatattgcttttcatgtttagggattgcttttctcccactatgatttaattttgttttaaaattacataacatatatctaaaatcaaaagtacagaataagatgaatttgaagaagtctagtgtccatttctgtcccctctacctgctcctttcttccctctatagtagctggggctacaggcacgcgccaccatgcccagctaattttttgtattttagtagagacagggtttcaccatgttggccaggatggtctcgatctcctgaccttgtgatccgcccacctctgcctcccaaagtgctgggattacaggcgtgagccaccatgcctggccccgtttttgctttttttttttttttattttagtaatccatcatacatagtgatgtgcacttctctgaagtagggcatagtatctggttgttttcctttatgtgatgttaacagccagctactgacatctttatgtgaatatgttattttatcagtggttacagaattatattctaattcttctgcatttattagctggactatatctataaagggagccatcctttctcaatgtcttggttacctgaagaatagtttatgcaaaaagaaaaactggaatgaaagattggtttttctcttattatttttcagcatctttcaaagcttattctgtgtttttcttttaaactattattattaacttgtgtattaaaacatatctgttatgtttcgatctgtgacaataactgttcttattaatgctcacattgttccatgtatggcaagtggaaggtttaccctctctgatttgtctgcttttggattcctttttattctttttgacatgaccccagtagtctttggcagattccagactttccgtgctgacagagtattccaggctcattttgtacaatttcctgtcccaaacataaaatcagccacttctttatggagccctggttccttttataagaagtgcttttaagaagtcacaacaaggatagtaggaactctcattgctcctagttgtcattgcttatagccttaacagagctggtgaaatacaaattttttagaaggagaaaaaaaatcctgagtgtatactgatatttccaattgaaataaaagattatagagtttttcttactatctttgattttatatttgtgttttataatctgaaaaaatcttaattcgtaatgattaatgatattaagattctcactgatatatgtgtgtgtataatcatttcaggttatatacatatattacttttagactaacaatgccaatattattaataacagtataactactgaaaaactctaagacataacttcataaagttataaactcttaagacaactttgaaaaacagtttatagttattttgtttgtaggttatattgggtctaatgtcaaatgactgtattttaaagttcccgaaaataatcacttcctttatatgtttaaccttccagctttatgcacagataagtttgtttcattttgcttttatttcttagagattttttttcattttgatttaattttgtgattatagttatagaaaacatacttgtggttccaaagtcaaatagatttgattggtaatactttataactttgttgtatgtctgtcttcctagaagctattgagctgtaacttttttcatgtaatatctttgtgaggttttagtattatggttatttggcctcaaaatgtagaacagactgctgtctcctttttctgttttctgaaaacgtttgtgaaagaacagtattatatctgccttaaatattggtagaatttaccagtaaagccatctgggccttctctgtggacagtttatttgtttgtttctcacattcaatttctttaatatccatgggatgatttgtatttctgttttttcttgtgtgaattttggcaatttttgttttaaggaatttgtctatattgttgaaattgccaaaattattggcatagaattgtattatctttttaattaaagccttaaaaaatctgtggtccagtctccactttggtaatatttttttttgaaaacttgataggggtttgtaaactgtattaatcttttgaaagaattgatttttgagtttgttgatattctctattgtaatctactttatattgtggattttgtgcttatttttattctttcttttcttcttactttcagcttcacttgctcttctttttccagcttcctaaggtgggagcctaaatcatttttctaacataagcatttaacactattaattttcctctaaatactgcttttgttgcagctcacagaatctgataagtgtgtttccattgtcactcagttcggcatatttttcaatgtctttttgcatgggttatttagaagtatgtttaatttccaaatatttggagattcttgttactagtttgtaatttaataatatgtggacactgaccacagtatattctctgtataattcagtttttaaaatatttactgttacttgttttatgacccagcatctggtttattttgatgacctttccatacgcagttgttaatgaagagtctgactcttgctaaaatcctatgtgtgggttctcaggctccaccaggtcattcctggcaggccacacaggggaaaggtggcctccccgcagcagacttggtgcacttctagtgcattacagtctctaaagggagttgcagtgcaggactcaggcctcccagaccagccatgctgttatgcgtgtttacattcctaacccaggcacctccattaggaggcctctttatcaggtgcctctgccaagaggacatcctaatctaggggagaggggaaactttgaagacactttctttccccactcttagtatccggtagttttaatttttttctttatttcttttttctttcttctcttttctttttttttaacatatttttggagacaggatattgctctgtcgcccagactggagtgtagtggcatgatcatagctcattgcagccttgaactcctggacagttcaagcaatcctcctgcctcagcctcccaagtagctaggactacaggtttgcatcacaatgcctggctgatgttttattattattattattattattattattattattattattattttgtagagacagattcttgctatgttgcccaggctggtctcaaacttctggcctcaagtaatcttcctgcctcggcctccccaagtgctggggttgcttacaggcatgagccaccgtgcccagccaggcctcactactttttcactcttagcccttcccttgtcttcttgtcccctggtcccagtccataaaatgaatgataggagctttttgttctgcattcccttagcagtgagatgactcacttctgcactgatccacatttgcactgatctgcctgaccctctctgaccctctccaggtgctatttcatggttggggttgggggagtgaaacagtggagtactcagcgctttctctgggttagcctcttaaattaagtgactactaagtgattaaaggctggttgtgttaatcacttattccaacaccttgcagctcagttctcttcagcccagcttggcttttggtaagtgggtgtggtattctattaatatatatttatcatcttggccaaggtacttgatatagtggtatgtaaatcctctatattgttatcgattttattgtctacttgttctgtcagttactgagcaaaagattttacaattcccaactctgtgggtttgtctctttcttcctttagtactgtcaatttttgcttcacacattttgaagctttgttgttaaatctctacatttggattgctgtcttcttgatgagttgatcctccttattgctagtatttctctttatcttgaagtctattttgtcttatactaatataggcatacaagctttcttgtgattagagtttgatggtgtatcttcccattttacttttagcccatctttatatttaaaatgtgcttcttgtaaagagcatgtagttggaacatgcatttttatcttgtcttgttaccatttttttattggaatggttgaactattattaatacaatttagtttaagctctgccatagatgggagcatccatatgtggctcttaagaagagcttagggccacatgtggtggcttatacctataatcccatcactttgggaggctgaggcaggaggattgcttgaggccaggagttcaagaccagcctgggcaatgtagcaaaacctcatcccaacaaaaaaagtaaaaattaggtgagtatgatggcacatgcctgcagtcctagctacttcgaaggctgaggagggaggattacttgagcctaggagttcaaggttacagtaagctatgatcataccactgcactccagcttggttgagagtgagaccctgtctcaaaaaaaaaaataaataaataaataaataaataaataaataaataaataaataaaaattaagagcttggcacttttttggagtttaggtcttttaaatttgtgccctcagctctctgatgaatttaaaagaaattatgacttttcatcttatctgaattatttttaggttgttaggatgggcccaagtatctcttgcagaaatctatatgttgaagaagtcaaattttcagttaaaaatgtattgagcacctgtatcaatgattctctgcaggggcagttattctccctagagggtgttttggaaatatatctaggtactgttgaatgttaaagtaagtgggttgagggtaaagacttctagcttttttgtttgtttgtttgagacagagtctcactctgtcgcccaggctggagtgcagtggcgcgatctcggctcgctgcaagctccgcctcccgggttcacaccattctcctgcctcagcctcctgagtagctgggactacaggcgctcgccaccacacccggctaattttttttatttttagtagagacggggtttcaccatgttagccaggatggtctagatctcctgacctcgtgatccgcccgcttcggcctcccaaagtgctgggattacaggcgtgagccactgcacccggccgatttctagcttttgaaggagtgaggtctcggatctaggttagagattacccaactttttctgtaaagggctagacatttcatatggctttgcgggccacatggtctctgctgcaactcttcagctctgctgctgtagtgtgaaagtagccaaaggcactatataactgaatgagtatggacgtattccaataaaaccttatttacaaaattagttggtagacagtagtttgccaagttatgatttagttgtccatcagtgcataacaaaaaattgtctgtgatttgcaaaattgagaaccatacctggaaaaaatgtgtttatgattttccaggtctggaatctcttacataatgcattttgtgcatgactttttcaatttgctgaatttatctactttcctattattggatggttttactattagctgtatcttccaggaatgcaaccatgatttgattgagaaaaaggctctacttcgcttaagaaatttactgagttttttttaaccatttcaaaaagttatagtattgatggcaatgctaattgtgttatttgtcttgcctatagcaaatatgtatagaaacctccatttatagataatgcatttctatttattctatacgtacacatgaacacacatatatttagcctttatttcaaaatgtcaaatataaaaggtgtcaacaatacttagttacatattgtcattttataagtctaaatttcttcattataagtaattgtaggcataagcatttaattatttgtgccttctaatgtagttgtgtatgatcataaatatattgaaatattaagttgttcattatctccatttttgacatctatagatgtgtcgttattacctatgagtttcatttcagaagtagtagagacattgttatattttctttttgtatatagaaagcattgagtttgatcaagttaagaaccacaacatatgtctgtcccccttagtgtgtgttttgggggtgggagaaacaggaagaaaagaacaacaaagataattccaactgaatcatttgttactttgcaaaacacctggtctcatggttctgctttctcctccgtagctctgcattctccagactctgtgctttcctaagataggaacccagaagaggactgatcatttcttgcagctctaaaaaccatggctcgggtaaattggagtttccttgtgctcttttcacttacttttttacagagcatgtgtgtgtttgtattccttactcctgaaacttcattcctaactgacctcactcaggaatgtgctcctcagtttgtcccattctgataagtgatagtgtcttccctaagtgtgtctttcgaatctaacctttagtcacatacttactcaacaatatgtatattgttcagtaatctttgactaggaacactgatctaacaaaagtagagttccctgatttcataaggtagaggaggatgttaaatggcaccacacatgaaaaccttttgaacttctctttagatctaagttcccaggtagacaagacaggagttggtcttgactgggctcactctcagtatgtggcaagcgctcatgctttatgagtttttaagattaggaagatgattagggactgaatacagagagatcagggatcttccccaggaacatataatttaatatggatcaatttgaaattcgacattatgtgctggtcttgaatgtataaatttggattatgtttttcacctttctattgtttagaatgatgaaaagttacatttacggatgaatggtaaatatgatcatagtgaagatgatcattcaccagcagaagttgttgagaattataaactctgagaaccaagaaatacttacaagatttttacaacctaaaatgttcaaatatgagcacttattaagtcagacatattcattatatggagctattctgtagcctataaaatatttactaaattattgatgacaaggaaaatgtttatgatatagtactctgatctaatggtgaatctggagcttcaataaattctttaattttatacaaatcttattttataaggttttacagaaaaattttaccattttgtttattccttaaataatgaagagagaaacttacatttattgagaatgtatgatacacaatatacatattgtataaaatgcttgtgtatgctacttcttttaattgggacattgcatttattttattcccagacttatctgtaaagtaagatgttctgtatgcagaaaatatgtgtagcaggccaggtgcagtggctcacacctataatcccagcactttgggaggcctaagccttaaggccaggaattcaagactagcctgggcaacataacaagacccctgtctctacaaaaaaattggaaaattatcagggcacagtggcatgtactgtgagtggcacgtactgtggtctcaactactcaggagaatgagacaggatcacttaagcctaggagttggaggctgcagtgagctatgatggtgccactgcactccagcctggatgacagagcaagaccctgtctccaaaacaacaacaacaaaactatagcaataggaataatcaggaacatatttgtacttttcagcccatgtgctctgttgcttcctttgtggagggatcttcatctccctctccattgaaaaagtatttttttggccgggcacagtggctcacacctgtaatcccagcactttgggaggcctagtcgggtgaatcacaaggtcaggagttcgagactagcctggccaagatgatgaaaccttatctctactaaaaatacaaaaattaactgggcgcagtggcaggtgcctgtaatcccagctactcaggaggctgaggcaggagaattgcttgaacctaggaggcggaggttgcagcgtgccgagatcgcgccactgcactccagcctgagcgacagagcaagactccatctcaaaaaaaaaaaaagaaagaaaaaaagaaaagcattttttaaatttccaaaattaacattttgtttgttgtttcagaaattagtgatgttcagggatgttgccattgacttctctcaggaagagtgggaatgcctggactctgctcagagagatttgtatagagatgtgatgttggagaactatagcaacttggtatcactaggtaaggaatctagccttcatatttcaggatctacctttggattggctgctttctctgctgttatttcaaatttcctttttaagtaattaactgaatttcttattcttttcaaaggaggagtttgaaattactggaagtagacatggtttctcagggcacctttatcttttccatccttcaaaaagccttaccactgccttctaataccatcttccctgatgaacaaagggctagatttgaagtttgggatacttggaatattggcagataaaacagcctatacattgttacactttagatctgctaaaggagctctaaataattcacacgcccagtcacagatttaaaaaatagatgcagagatgtatgttttttctgataaaagagtttacatcatttgtatagtgatagagtagatcaatgcatttcaccaacaactcaaatgaagacaacccattaattagaacaaacacattgtcttatatgtgcttggtagttgaatattacatattaagaactttgggctgggctcggtggctcacgcctataatcccggcacgttgggaggccaaggtgggtagatcacctgaggtcaggagttcaagactagcctggccaacatggcgaaaccccatctccactaaaaatacaaaaattgagctgggcatggtggtgtgtgcctgtaatcccagttactcaggagattgagggaggagaattgcttgaacccatgaggtggaggttgcagtgagctgagatcacatcactgtactcctccagcctggatgacagagcgagactccatctcaaaaaacaaaaaaaaaagaacttgcattggacattgaatgaatatgctagaatcatcttttattgtaaaatagttgagggggaacctgtgattgtctaagaaactttattgttttcttctgtagtatttttatatgaaacaaaatccgtatcaattacaactttaataagtgattttccaacctacatgataactttattccttgtgctggaataaactgtctcttgcctcttccttcctttctcctctgaagcctttaggaagtcagtgattaacacatgtccctagaggacccaagtggtgtggaaaaaaacctatgacttgaggagaaaagcaagggtttttcaccatgatcttcctaaagactcttacctaatttctactgcgtcctttccctgttggtttttattatcattcttcccactttcaaaagagggaatggttggccgggcgcggtcttgtatgtgcttggtagttgaatattacatattaagaactttgggctcggctcggtggctcacacctgtaatcccaacactttgggaggccgaggagggcggatcacctgaggtcgggagttcgagaccagcctgaccaacatggagaaaccccgtctctactaaaaatacaaaaaattagccgagcatggtggcgcatgccagtaatcccagctactctggaggttgaggcaggagaatcgcttgaacctaggaggcagaggttgcagtgagccgagattgtgccactgcactccagcctgggcgacagagggagactctgtctcaaaaaaaaaaaaaaagtgcaaattaaaaccacaatgatatagttatttcacatgctataaattggcagcttgacagtaccaggcattctcaagatttgaaggcagaagtgcactatatcttgatattcacaatagccaaaaagtgggaacaacccaaatgtccatcaactaatgaatggataaaatttggtattttcttaaaacgaaatattattcagcaataaaaaggaatgaagttctgatacatgctttaacatggatgaaccttggaaacatgctataaagaaatacccgaggctgggtaatttataataaaaagagatttacttagctcatgcttctggaggctgtacgagcatagcactagtgtctgcttggcttctggtgaggtccaggaagcttttagtcatggtggaagggagggggagtcggtgtgtcactggcaagagagggggcaagagagagaggaggaaattcaggctcttttaaacaaccacatctcgcgtgaactcatagcgtaagaactcacgacagagtcttgctctgtcgcccaggctagagtgcaatggcccaatcttggctcactgcaacctccttctcctgggctcaagcgattctccttcctcagcctccccagcagctgggattacaggcacctgccaccacacccagctaatttttgtatttttagtagagatggtatttcaccttgttggccagactggtctcaaactcctgacctcgtgatccgcccacctccctcccaaagtgctgagactacaggcgtgagccagtgcacccggccaagaactcactctttaccacaaagatggcacgaagctattcatgagggatccacccccatgatccaaacacctcccaccaagccccacctctgacactggagattacattcaatgttagattacatcaacatgagatttggaagggacaaacatccaaactatatcccatgccaagtgaaagaagccaaatacaaacactgcatattatatgattgcatttatatgaaacgtcctcaatagggaaatctatactgacagaaagtaggttactggttacccagcactggggatggggaagaggtagaacagatggagaatggggagtggggagatgagaagtgactgctaatgaacacagacagcatttctcttgggggtgaaaaaatgtttaaaaattagattgttgtgattgttgcacatctcagtgggtatactaaaagccactgaattgtgcagaaataatatggaaatggttgccaaacttgtgtgtactttagaaatagctacggtcttttaaaaaattccacagcccaggccacaccccagaccaattaaataataatttctaggcatggtacatgagtatcatattttttgaaattctctaggtttttcaaatgtttagccatgtttgataaccactgcactgtggtattatctgagaattttttttaattgaatgttcactccatttaatttattaccaatatacttggatttatttatcccctattttatgctttttgtttcctctttttatcttacgggcttaaaaaactttctccctccttaatgagggtggatacaatcgtgttttattttttgcaactccattttcccccttgttttgtttggaaaacgtacagtatttatttatttttaaaagttatctttaaatttttatcatgtgtacctaattccttttaatgtcaatggtattttatagtttttattgattgtaattgtgtctgaaaattatatatttaatggacattatatattttgatggatactaaaacatatttattcagtccacatacaatatttggtttgcatattgctttgcaataaacttgctctatctccacccctaggatttcaaggccagcaagttgaaaaacagacatataaataatagtatctactgtgaaataaattggtaacctttgtggcaattagttgaggttctaaggagagataagaaattgacatctctatgtcaaatatatattttattgtcacagaattcttatcagaagtataccagcaatgtatatctattatatactttatcaacagtggctattagcacgtagaaatatctttgttaaggccaggcgcggtggctcacgcctgtaatcccagcactttgggaggctgaggcgggcagatcacgaggtcaagagatcaagaccatcctggccaacatgatgaaatcccatctctactaaatatacaaaaattcggtaggtgtggtggcacatgcctgtaatcccagctactcaggaggctgaggcaggagaatcgcttgaacctgggaggcggaggttgcagtgagctaagatcgcgccacagcactccagcctagtgatagagagagactctgtctcaaaaaaaaaaaaaaaaaagaaatatctttgttgatttgtagatgaaaaacagaagaacatttctgccattgccggtgaatttaaatactttgggggtatttctgcctgttttggtactttagtaattatcattattgtttgtgtcacttgacaaatacatgcttaatttagtgaagtctaaaattcatgtctaactttccttaagataattaaaggatattgaaatgctttaactttgatctgtttctccaatctggtattgttgtctggtattttagttctgttctttttttaacctacaaaatgggcattatttttgtttcataatggcaatgtttgcttgtggatttgttgatgtaattatcttttatttgtatgctattcctctttcattataccttccttctgggatattttatttatcatgaaatacattagggaaggcttattggttttatttttttcttttcttttcttttcttttttgagatggggtctcattcttgttgcccaggctgtagtgcagtggcgcaatttcggctcactgcaacctccgcttcccaggttcaagcgattctcctacttcagcctccccagtagctgggattacaggcgcccgcagccaagcccagcttattttttaatttttagtagagacggggtttcgccatgttggccaggctggtctcgaactcctgacctcaggtgatccacccacctccacctcccagagtgctgggattacaagtgtgagctaccacccccggcctgtcttattgttaataaatgctctaagtgtttgtttttgtcattgttgcaaaataaccttgtttcactgtcattcttgcctgatgatttaactaggtataaaattctatactgacaattatttttttctcagcactctgaagatattattccactgtcctctggcttctattgttgctcttgagaagtctgccatctgtttcattgttattccttttgtaagtaatctgtattttctctggctgcttttaagatttttttctttaagatttaaatgtaattgattatattgtttcacttctagatgtttgatgttctccccctctcccagatcttttttttttaagctcatccctttctcatggtttttatcttatactttcatatatttccagcacttatgtgtcatacaatcccaatttctgggaaacaggtctaattttgctgtttcttgtatccatggggactcttgtgtaatgatgaattatccatagcactttttttctccttttctttgagagtccaggccaagactgaaaagtcccttgtcattttcctttaaggtttgctggatttgtttttctttctctgaactttatgtcttgaatatttccaattttgtaaagaggtttgtttgtaatccctgctcttttgttgaggaaaggtcttgtctgttcagttttttcagaccattaatatacaaacatctaggtaattaaaatcaacaaatatcccaagggtaactgtaacttcagagcatatttactccatctactttctggttcctacttcattgtagcacccctggatcttgtttactttcttttatgcttcacatacttttaaaaggacatctgtcatatttttccagtatttgttagtgttttttaagaaatcggatgcaccatttacatattaacaatattgaatccttttattgttcagcatgctaaatctgcttttctttttatgttctctgtaaagtttcatggttttttcttattcttttttttttttttgagacagagtctcgctgtgtcacccaggctggagtgcagtggcgtgatctcggctcactgcaacctccgactccccagttcaagggattctcctgcctcagcctcccaagtagctgggactacaggcacctgccaccacacccagataattcttgtatttttagtagagacagggtttcactatgttggccaggctggtcttgaattcttgaccttgtgatctgcctgcctcggcctcccaaagtgctgggattagtttcatggttttttcttaaaagatcttgcacatttcttaagcaatttctcagtacattttgtttataatatgaataggaatattttgttctgtaacattttctaaatggctaatactgatatatattatatatgagaaagtattgatttctataaattgaaaatcttatggaaatatagtttttcagtggattatagtggatttctaggtggacagttttgctctctacatacaatatgtggtctcttccttttctgtttgtacctttaaaaaaaggcaactaaattcagtaggaccctgtagcggaatttgaaaacaaatcattcttatcttttctcaaactttattggcagtgtttctaatgtttaactattaaatgtatttctatagacatctggtagatactcttaactaggtttttacctaattccagttttagagaacttttaataaaaggtcttagaatatattaaaaatttttttgcatttcttgaaatcatgctattttattctttaagttctttatgtgggaaaatggactctgatgttgaattattcctgcatttgtgggataaagtttatatgatcatgatgtgttatgccttaaatacacagctagattctatgttcctaatattttcttttaaaattttacctttgttcacgagattggcttcgttttcctaaggtcatttttcaatgctgttatactagttaatttaactttgtaaaatgactagggtagattacaatatttttatatgttcaacaacagttatgtacgattggaattatatatccttttttcttttttttgagacagggtctccctctgtcacttaggctggagtgcagtggcctgatcacagctcactgcagcctccacctccctgagcccaggtgatcctagttgagactacaggcatgtgccaccatgcctggctaatttttgtagtttttgtagagatgaggttttgccacattgcccagactagtctcgaactcctgggctcaggcaatctacctgccttggcctctcaaagtgctgggattacaggtataagccaccacacccggcctatatattctttaatgtttggataatattgccagtaaacctaccagtcactggaatctattgccttgaatattagatataataggtactatgaccagcagatacaaatgatcatcagtcataggtatctattgccttttaggagcacagacactgagctcaaatttaaattttttatgtggttattgctgtatatcagttattatatcttcatgggttatttttcatgtttttcatctgtttcatccagttctaatttactgttgcgttaataggttttttcataaacacttttaaaagttttgttttattttagttgaaacataatgcacatatttatgggctaccatgtgatgttttatacatatgtgtattgtgtaattatcaaatcaggataattagcatatctgtcacctcaaacacttgtcatttctttgtggttaggacattcaagatgctctcttctagctatctgcaggcattcaggacatttttgttgactatatagtcaccttattgtgcaatagtacatcagaacttatttctcctatctaactataactttgtacccatagaccaatctcttcccagccaccccctcagcatctggtaaccactgttctactctctacttatatgagatcaacttttttaggttccacatatgagtgagatcatgtgatatttgtcctgttcttggcgtatttcacttaatataatgtcctctagcttcatccaagttgtcaaaaataacaggattttattcatttttataggttaatagtattctattctgcatatataccacatttttgaaaatccatttatcttttgatggacactgagttcgagtccatgttattgctattgtggatagtgctgcagtaaacatgggaatgcagatgcctctttgacatactgatttcctttcctttggatgtatacccagtagttagattgttggatcatatggtagttctatgtttacttttttgagaaacctccatactattttccataatggctgtgctaatttacattcccaccaagagtgtgtaagagttccccctttttccacatttttaccagcatttgttatcttttgtctttttaatagccattctaacagcagtgaggtgatatctgattgtagcttcgatttgcatttccctataattagtgatattgagcattttttcatttacctgtttgccatttgtatgtcttgagaaatgcctattcaaatcttttgactattttttaatcagattatttgtttttttgctgttgagttgactttcttatatattcttggtattaacaccttattagatgcatagtttgtgaatattttcttccattctgtaggttgtctcttttttgtttgctttgagatggagtctcgctctgtcacccaggctggagtgcagtggtgcaatctcggctcactacaacctccgcctgccaggttcaagtgattctcttgcctcagcctccagagtagctgggactacaggcacatgccaccacgcccggctaattttttgtatttttagtagagacggtgtttcactgtgttagccaggatggtctcagtctcctgaccttgtgatctgcccgcctgggccccccaaagagctgggattatagatgtgagccaccatgcccaggctgtaggttgtctctttactctcatttcctttgctgtacagaagctttttactttgatgtagtatgtttatctgtttttgcatttgtcagtgcttttgaggtattattaaaaaatccttgcccagatcagtgtctgtttccctgtgttttcttctactggtttcatagtttccagtcttacatttaagtctttaatccattttgagttgagtggtgagacaggggtctagtttcattcttttgcaggtggatattcagttttcccagcaacatttactgaagaaagtatccttttcccaatgtgtgttcttggccttcttgttgaaaatcagttggctgcaaatacttggattttttttttcctgggttctctatcctgttccatttgtctatgtgtctgttttcatgccaataccatactgtttggttactattgttttgtagtatattttcaagtcatggagtttgatgcctccagcttggttctttttgtacaagattgctttggcggcctggcgcagtggctcacacctgtaatcctaacactttgggaggctgaggcaggtggatcacctgaggccaggagtttgagaccagcctggccaacatggcgaaaccccatctctactaaaaatacaaaaaattgctgggtgtggtggcaggcgtctgtcatcccagctactcaggaggctgaggcaggagaatcacgtgaacctgggaggtggaggttgcagtgagccaagagtgtgccattgcactccagcctgggcgacaagagcaaaactccatctcaaaaaaaaaaaattgctttggctgtttggggacttttgtggttccatatgaattttaggattcttctttgtatttctgtgcagtgtcattggtggtattttgatagggattgcatagcatttgtagattgttttgggtagtatggacattttaacaatgttaattcttctgatccatgaacatggaaaatatttccacttattagtttcctctttaatttcttttgtcaatgtttatagttctcattgtaaaactcttgcctctttggttaaatttattccttttttttttttttttgctatctattataaatgggattgatttccttttcacagtttcctgttggcctatggaaatgctacttatttttgtacattgattttgtcagtcattagcaccttattttgttcatttgttgagctcatattttcctgaatgttcttgatgtttatggacacgtgatgtctgtgcactgagcaatttattcaagagtttgcaggccggaacctggtatctcacgcctgtaatcccagcactttgggaagctgaggcgggtggatcacctgaggtcaggagttcaagaccagcctgaccaatatggtgaaaccccatttctactaaaaatacaaaaattagctggccatggtggtgtgtgcctgtagtcccagctactcaggaggctgagacaggagaattgcttgaaccctggaggcagaggttgcagtgagctgagatcatgccactgcactccagcctgggcagcagagcaagactccatctcaatcaatcaatcagtcaatcaatcaagttcacagtctagctttgtttgtgcccatccttcttccaaaggccttccagacattctaagcagactatctatctgttgtattcccttgagcctgtaaccactgcatccatctcagcattaaagggcattaagcccaggcttcctgctagccttgcaagggctccaaggttgttgtggctctccacctgggtggacctagagaaaacccaagaaggatactggtgctgtatgggagtccagacagggacctgagcccagaagactgtcctggtggcccagatgggtgtgccttcagcaggtccttgcacaggcaagataggtctctaattacagtgagagggctggagctgagactgggccccctcaggatttgctgtcctacaggacagaggctggcaagcctatcttgttggcttagacaggtgtacatctcccagcatgtctctgcacagatggggtagttctatgactgcaacaggaggggctagagcttagactgggccctctcgggatctgctgtgggacagaggcttccatgcacagatggaatagttccctgactgcagtgggaggtgctggagctgagcctggaccccctgaggatgtgctatgggatggcagctgatgagcccatctcagcccacatgggtgtgtctcccaccgtgtctacacggaggggatagttctccagttattgcaggagggcccaaggcaaagactgggcttcctcaaggtctgctgtgggacagaggttggtgagcccatcgtgaagactccaactcccaaaccatgagatacggatgaatcttactctggatccttgtatgagcggttctgagctggcacccccagctgaggaggctggagctaagccacagagcaactgtgaggttcactaccaggactgttgtcagcaggcataagagactctccacctagacactagtgtgcatgattcctcctggacctttaggcagatggttttgattgcacgcccaaggccaaatggggctgtagccaagccctctggggaatggggccattttcaagctttgaacatgggatcagcatgggagatcagccacctgcgtgccagtctgcactctcaaaatgactttcctaggtcttgggctttactcaagttttacaacctcctacctgaattccaaagcttctgcaaagagacttttatctgtggatgggtgcagaattctcgtgaggggatatgagtgggttacctcctatttctgccatcttgctgacgtcactcccataatctctcataaacactttttaactcctcaatttatggttacctttttctctccagtgctttggatttgtgctaaatctaatttttttctacacgtcactttttttgtattatttatggatattttcaaataattttggtattttgattttgctaattatttctgctgtttctacgtttctaatttactcattttctgattttttatctcacttatattttggtttttagttatgctttttgctcacttcttcttgaggtgaaatcttaattctcttaactatagtatttcttgttttttaataaatgcacttaagactgtaaatttccctgggtacaattttagctgatttcttgggatttcacacaaagtttcttttgctatttggctctaaattgttttaaaattttatttttatttccttctataacaaacatcatatagaattgtcttagtaacttaattctaggattatatgttttttctatgtttttataatttttagttttatgctaatgtgataattaaaaacattttatgtcagttttatctatcttcctatattactaattatgttatagtcttccttgtttttatttctggtctgtttatattctattctctactatgacggtgattaatttctctatatgtctgctagtttttgtttatttaggagctaagttgttggttacataatggtcatgactattcatcctcttgcctggctcttagatgatgtccctgagctgatctcactgagaaaactgaagctagcagaagagaagagagattcttgcttccttgtctgtttacctaccttcatctatactaattcaacctcttttcctattaacatgtaacctttttgtgcctttacttaagcccagtaccctcacttgtatactgaattccattccttctcatatttttaaggacactgttgaagcaattgccctttgtctcttctaacatgaacttgtccatatcttttacaataattttcatcagcatacaaacatgccttaatttcttctatcttaaaaggaaaaaaaacaaaaccaaatattttgacacacattttcctcttgatatagctccatttctttgctactttttacagaaaaatacaaaagaattttccatattccctaactccagctcttctctcattttttttttgtctttttttttttttattatactttaagttctagggtacatgtgcacaacgtgcaggtttgttacatatgtatacatgtgccatgttggtgtactgcacccattaactcgtcatttacattaggtatatctcctaatgctattcctccccccttccccctcccccgaccccacaacaggctccattgtgtgatgttccccttcctgtgtccaagtgttctcattgttcaattcccacctatgagtgagaacatgtggtgtttgtttttttgtccttgagatagtttgctaagaatgggtttccggcgtcatccatgtccctacgaaggacatgaactcatccttttttatggctgcatagtattccatggtgtatatatgccacattttcttaatccagtctatcattgatggacatttgggttggttccaagtctttgctattgtgaatagtgctgcaataaacatacgtgtgcatgtgtctttatagcagcatgatttataatcctttgggtatataccaggtaatgggatagctgggtcaaatggtatttctagttctggatccttgcggaattgccacattgtcttccacaatggttgaactagtttacagtcccaccaacagtgtaaaagtgttcctgtttctccacatcctctccagcacctgttgtttcctgactttttaatgattgccattctaagtggtgtgagatggtatctcattgtggttttgatttgcatttctctgatggccagttgatgatgagcatttttccatgtgtctgttggctgcatatgtgtctgttggctacataaatgtcttcttttgagaagtgtctgttcatatcctttgccgactttttgatggggttgttttcttcttataaatttgagttctttgtagattctggatattagccctttgtcagatgggtagattgcaaacattttctcccattctttaggttgcctgttcactctgttggtagtttcttttgctgtgcagaagctctttagtttaattagatcccatttgtcaattttggcttttgttgccattgcttttggtgttttagacatgaagtccttgcccatgcctatgtcctgaatggtattgcctaggttttcttctagggtttttatggttttaggtctaacatttaagtctttaatccatcttgaattaatttttatataaggtgtaagggagggatccagtttcagctttctacatatggctagccagttttcccagcaccatttattaaatagggaatcctttccccatttcttgtttttgtcaggtttgtcaaagatcagatggttgtagatgggtggtattatttctgagggctctgttctgttccattgatctatatctctgttttggtaccagtaccatgctgttttggttactgtagccttgtagtatagtttgaggtcaggtagcatgatgcctccagctttgttcttttggcttaggattggcttggcaatgcgggttcttttttggttccatattgaactttagtttttttccaattctgtgaagaaagtcattggtagcttgatggggatggcattgaatctataaattaccttgggcagtatggccattttattgattcttgattcatcattgattcagtatggccattttacgatattgattcttcctatccatgagcatggaatgttcttccatttgtttgtgttctcttttatttcactgagcagtggtttgtagttctccttgaagaggtccttcacatcccttgtaagttggattcctaggtattttattgtctttgaagtaattgtgaatgggagttcactcatgatttggctgtttgtctgttattggtgtataagaatgcttgtgatttttgcacattgattttgtatcctgagactttgctgaagttgcttatcagcttaaggagatttcgggcagagactatggggttttctaaatatacagtcatgtcatctgcaaacagggacaatttgacttcctcttttcctaattgaataccctttctttctttctcctgtctgattgccctggccagaacttccaacactatgttgaataggagtgatgagagagggcatccctgtcttgtaatgcttccagtttttgtccattcagtatgatattggctgtgggtttgtcataaatagctcttattattttgagatacatcccatcaatacctaatttattgggagtttttagcatgaagggctgttgaattttgtcaaaggccttttctgcatctattgagataatcatgtggttttgtctttggttctgtttatatgctggattacatttattgatttgcatatgttgaaccagccttgcatcccagggatgaagcccacttgatcatgggtagataaactttttgatgtgctgctggattcggtttgccagtattttatcttctctcattcttttgaatctggttcagtcagaacttgctcccattattctgccaaaactattattgtgaagattaccagtaatctccattttgctaataatgccatttttaacttaggaagcacgatttaggccgaacacggtggctcacacctgtaatcccaccactttgggaggccaaggcagggagatcacctgagggcagaagttcaagatctgaaggggtggcctgcccctccatacctgtgggtgtttctcgtcaggtggaacgagagactgagaaaagaaagagacagagacaaagtgtggagaaagaaaagtgggcccaggggaccggtgcttactggtctctgagttccctcagtatttattgatcattatctctaccatctcggagagggggatgtggcaggacaatagggtaatagtggggagagggtcagcgggaaaacatgtaaacaaaagtctctgtgtcgtaaacaaggttaagaaaaggtgctgtgccttgatgtgcacgtgtacaaacatctcggtgcattaaagagcagtattaccactagcatgtctctcctccagccctaaggtggttttctcctatctcagtaaatagaacatacaattgggttttacactgagacattctattgcccagggacgagcaggagacagatgacttcctcttatctgaactgcaaagaggccttcctcttttactaatcctcctcagcacagacccttttcgggtgtcgggctgggggatgtcgggctgggggacagtcaggtcttacccttcccatgaggccatatctcaggctatcacatggggagaaatcttgggcaatacctggctttcccaggcagaggtccctgtggccttccacagtgtattgtgtcctgggtacttgagattagagaatggtgatgacttttaacaagcatactgccttcaagcacttttttttaacaaagtacatcctgcatagccctttggtaaatccattaaaccttgagtcaacacagcacatgtctctgtgagcacagggttggggctagggttacagattaacagcatctcaaggcagaagaattttcttggtacagaacaaaacggagtctcttatgtctacttatttctgcatagacacggtaacagtctgatctctcttttcccatttcccccttttcttttggacaaaaccgccatcgtcatcatggcccgttctcgatggtcgctgtctctttggagctgttgggtacacctgcagactaacaacagacagaacaggcacacaaggattaataggaaatttacaatagtagaacttccgatggtcttaacccaagtgacagggttaagatttgtgagaccatcagcaactccatgattgcctcagttcctggtaccaaatttaatgggctttgatccttcaaaaatttgttcttttaatttggaaatgtctaaagtgagattatcttttcttccctgtagacggcatctaaccatgtcccagtgatgctcagactcattataaactccaggtgtaatacaaaaatctgacgtattccagtcacactgtaactggaaatgatgttctaagctcatgagcctatctcccatccaaatgacagtctaagatcattaatttgatttgccaatttttgatcaataccagattgtgaattccaccatcttgtagaattcttttgccaatcattaacaaagtttactgtccgaacagaagagtgcaatgcaactcctgccacagcggctgtagttgtgactgcgattaatcccataatcactgcaattaaagtaaaaatgaatcttttggatctatttaaaatgacttttaatacttcagtcaaaatatggatggatggcgaggcctcccactgtcggtccatggacacagggatccacacgccttcccttgctctcactagcagaatacggtgctgccaattgaaagttgaatcaatgcaagtaaacaatctgcaattttcacaggttatatagtttgggagtctggtttaataactatatttcctacaactagcatataagggcgctttatacaactttgtaaagaaaccgttagacttgaatttaggtcgatagtataaaatggcttatgatctcctgtttctatagcttgatttccagatcaaattctaatgcggtatgaggccacagtaagcctccataattctggatgttcaggaccagaaacaggacttattatttttggtcttggagtagagattcctttttctccccattcccaagggtagaaagactgtaattttttgtgcttatgtttgtctaaactttctgttaagtcactatcaacagttggactcacttgtgcactgggacatgactgagtttgtcctgtgcaattgtggtagaattgacctcgaggtgcccaatctataatagttccaaattcatcattttgtaatatcaccacactattggccacacattcttcctaaactaaaacttctgtgtcttttgataccttgggaatttccgtggggcaaggtttccctttaggcctacattttaatgatctttgataagaaaagtcctgtaaataatttacctgtggcctgagtgacattccgcttaccatgtgataagtgaatctactggtggtacagtaagtaagtacttctaccaaccaattttggattgtaggcattaaacatcctggtgttctccctagacaaataggaggataacgatacccagtagaaatatttatcgtcattccttcttcctcaggtttggcagggcagtgatcatctgtggggccaggtacccatacactgttattaacatatacttcaataggattatccatccatgcgactgcccgaattaagggcaggaaaggcacacaggcccagtaggtataattagctgcagctgctcctacaggcatggggagacttaccaccattgatacaatcatcaaagctgcaagcagcatactctctggagtttgtgtcacctttgtgttctcaaggccttttttagctaactgtgtcagcttctttaattgtgcccaagtcggcggctctgccttcttggtgaatggcaacttcatctattcttctgacatcaccattttatcttgtgagttgatggtgcttgattgcagtgtttctgtctccgtggaggtgcttttctttgcatctccgacaggttcattgtagaacttcaaatgtctagttggtatccaaacaggaagctgattttctcctggtgaaacacaagcaaaacctctcctccacgttaccaccttccctatttcccatgtcttattgttgttgtctttccaccaaatcagttttccttcatgtgggctattcttttttttaccagtaagatgttgttctgcaggagtagtagtctgatttctataaatgtttaaaaaatttaaagtatagagtgctagattaagttgcatctgaggagtggtacactccttactgtctcccccttctttttgtttaactaattgagttttgtgtgttctattagttctttcaactatggcctgtccttgggaattatagggaattcctgttgtatgtgtaattttcttggaaagctttactacagtatcctggtccattgttagttttaattttttctggaactcccattacagcaaaataagataataaatgttttttaacatgggaagtactttctcctgtctggcaggttgtccatatgaaatgtgagtaagtatcaactgttacatgaacacatgataatcttccaaatgaaggtacatgcgtgacatccatttgccataacgcattaggacacagacctctgggattaacttctgcctcttgagtgggcaggtgtaggacttgacactgggtgcaatgttgtacaatattttttgcctgtttctatgtgacatcaaatttgttttttaatcctgctgcatttgcatgagccaaagcatgaagttcttgtgcttttatgaatgcagatgataccagtaagtcagcttgttcatttgctttagtcaaaggccctggtaaattagtgtgtgctcgaatatgagtaatataaaatgggaaatttctttttcttacagtttgttgtaataaattgaatagctggtttaactgatcatccatgctatatttgattagagctgtctcaacatcccttgtagcctgtactacatatgcagaatctgatacaatattgatagattgatcaaaatcttataacactgtaatgactgcaaccaactctgctctttgagccaattgatactgagttttgattacttgctcttttggctctgtgtaagctgcttttccattgttggaaccatcagtatatactgtcagagcattttctaaaggtccgtgactggtaattttaggtaaaatccaagtagtcaattttaaaaactggaggatttttgtttttgggtaatgattatcagtaattcccacaaaatcagcaagaccaatctgccatgcaccagaattgataaaggcttgtctaacttgttccttggttaaagggacaactattttgtctgggtcatttccacacaattttattattcgtaatcttgcctgaccaattaatgtagctatttgagccaagtataatgtaaaagtcttaattgtactgtgaggaaggaatgaccactccacaagatcagtattttgaacaatgatgcctgttggaaaatgtgcagtagcaaaaatcaaaagttggagtggggctaagggatctattctatttattgcactgactgaattttttcttccactaatttaatttcttttgttgcctctcgggttaatattcttttactatttaagtctgggtctcctcttaagatagagaacaaatttgacatggcataagtaggaatacctagagttggccaaatccaattaatgtctcctagcaatttttgaaaatcatttaatgtttttaatgtgccttttcttatttctattttttgtggcttaatttttttattttctatctgcatccctaaataatgaaaaggagtagaggtttgaatcttaccagatgctattgccagtcctgcgttggcaacctctgcttgcagaaatgtgtaacagtcaattaatttgtctctcgtttctgcagcacatcaaatatcaacgtaatgaataacagtctgaaaacttatctctaactggttgaagagcttgacctacgaaagtctgacaaatagttggactattaagcattccctgaggtaacactttccactgaaacctggtggctggttctttattatttatggctggtatagtaaaggcaaatttttcacaatcctgctccaccagaggaatggtaaaaaagcaatccttcagatcaattataattaaaggccagtcttttgggatcatggccggagagggcaaccctggttggagatgccccatgggttgaattatggcatttacggcccttaagtcagttaacattcgccatctgctggattttttctgaattacaaacacaggagaattccaaggcgagaatgaaggctcagtatgtccgttttctgattgttactttgctaataaatgtaaagcctccagttttcgttttggtagcagccactgatttacccatacaggtttttctgttttccaagttaatggagtgggtttaggaggatctacagtggccgcccctaaaaaggataccctattgctgctgtttcttgatttccctcaatctcaattgggactttaatgccattttcattttttcctagtccctttcctggtatatatcccatcttagtcgtgattttttgatttgtggggctatataatggggcaggcatagtgatttcctcaccccattgttgtaataaatctcgaccccacagattaacgggaattgaagtaatcattggctgaacagtactttcttgattatctggccctaagcaatgtaaaatctcagcactttgatacacttctgaggcagtgcctacgccgacaagtcctgtaacagccttttgtttaggccaattttttggccaccgattgaaagcaatgatagagacatctgctgcagtgtctaccaacccctcaaactgttttccttgaataatggccttacacacaggtctgctctctgagacctgacttgcccaatatgcagcctagctggatcagtgcttccaaaccctcctgttctttttatctcactgttttcaaccttaatataaggcaggaataattaagcaatcctgtctcctggactggcactccaaggaactgaggagctaataaccaattgaatttcgactttgtagtctgaatcaaccacaccagtatgaatttgaactccctttagatttagactcgatcttcctgagattagtcctacagtcccctcaggccgtgggccatatatccctgtggggatttttttgtgggggctccctggaagcagagagactgcttgtatagtacacaaatctactgctgcactgccgcttgtggccggggacagttgctgtattgtggtaactggcccattccctgaagcacttgtgacagtgggggttgttgtccctgaaaaccctgaggaacaaagggctaaattgggaatgccccagtttgttgcggggcctgaggctggcccctcttctcgtttcccgacaatggttgcccatttttatcaaatttagaatgacattgactagcccaatgttttccttttttacctcttggacataagtcaggtggctctttatctgttcttgtagtagtttgaatagttatattttgtttatttgaggctgggcaattctttttttgatgaccaatttgtccacaattataacattttcccctaaatgttctaacttgtcctcctaaagcaagtcccgttattgcttgagcgataagcatagctttatgcatagctcctccaattccatcacaggcttttacgtactcttgagattacatctgatcccactgggacctttccttttaatggtttaatggctgattgacactcaggattggcattttcgtatgccatcaactccactatgaccttacgggcattctcattggtaattgacttttgagcagcatcttggaggcttgccgcaaaatcagggtagggctcctttagcgccttgtcttattgtattgaatgaggggcaggcggttcctgggtcttggcttttttcccaggctctaaggcagataggtctaacttgctcagtggcctcattttacattattgcttgttaattagtagtgctccaattttgacctgttcctaatagttgatctgcatctatgttaactggaggattggcagccctatttttttggacctgttcttgtgccccatcaatccaccaagtcttcaccaagtcttaaattgtaaacattgagagggtgagagcgatcatttggccaaaatctcccaatcataaagaatgagtctatgtccatgagcaatggaatctaataatgtcctcatataaggggagttgggtccatactgttttactccctctttcatatcttttagcatttttatggaaaaggactcatatctggcctcagctaggggaggcgctccctcttgggcctcttcttcaggtggtatcggttctaatattactgggaattgccatgcctcggtatctccttgttttcttgccttatcaataattttatgtaatgcactaccctgtccactaggtggtggtgtaggattaaatctcatagtgggctgctgaggatatagcgccctgccctgtggtgctggaaacattcctggctgtccatactgattttctgggggcggctgatcctgaagttcggctggcggccagtattgataggttactggcggttgggtcttattttccaccggctgatattgtggatactgtatttggattggcattgccgtgacagagactctatctttccctatttgatattcttttggggtttgtacttgtctaacctgcatttgaggttgtaatgttacaggcatctgaactgctgggagaggagttggccatcgtggtttagactctgatggccccactaattctggacctttttcttctaattttaacatttcaggatatatcacttcctgtaattgattatagtcaacattttgcattgaccgaaccattaccggctctgctacatatttacaatgtgaactttccgttcctttcccagattctatccctgcctcttcttcacaatctattacacattttccagggcatcagaaactgaaatgctatcttctcctgtttgaaacagttctaaagctactttaataatggcccaatcattccatactgtaagtgggatgattttaccctccctacttgcttgttttaattctttgccaattttttcccaatcttttagatctaaagttccccgttctagaaaccatgggcagaattgttctattgtttgaaatagagtgattagattttttttgtagagactctgactccccctctttttaaaagaattttaatggagctaagaggcatatttacttttagtttgtcccattgttaccctggcttcttctgagcgcacaagtttaccgcaaagggtgaccatagacgtactcaggaatctctcgttgacttgtcctcattgaccacgctcgagcgtaccttcaccctagagaaaagcacctacgttggacacccgatgaaggagtggcctgcccctccacacctgtgggtgtttctcgtcaggtggaatgagagacttgagaaaagaaagagacacagaaacaaagtatagagaaagaaaagtgggcccaggggaccggcgctcaccatacggaggacccgcgccagcactggtctctgagttctctcagtgtttatggatcattatctctaccatcttggagagggggatgtggcaggaccgtagggtaatagtggggagagggtcagcaggaaaacatgtgaacagaggtctttgtgtcataaataagtttaaggaaaggtgctgtgccttgatgtacatgtatacaaacatctcggtgcattaaatagcagtattgctgctagcacgtctcacctccagccctaaggcagttttcttctatctcagtaaatagaacatacaattgggttttacactgagacattctattgcccagggacaagcaggagacaggtgccttcctcttatctcaactgcagagaggccttcctcttttactaatcctcctcagcacagaccctttacgggtgttgggctggggggcggtcaggttttcccttcccacgaggccatatctcaggctatcacatggagagaaaccttggacaatacctggctttcctaggcagaggttcctgtggccttccacagtgtattgtgtccctgggtacttgagattagagaatggtgatgacttttaacaagcacgctgccttcaagcacttttttaacaaagcacatcctgcatagccctaaatccattaaaccttgagtcaacacagcacatgtttcagggagcacaaggttgggggtagggttacagattaatagcatctcaaggcagaggaatttttcttagtacagaacaaaatggagtctcttatgtctacttctttctacatagacacagtaagaggctgatctctctttcttttccccacaaagaccagcttggccaacatggtgaaaccctgtctctactaaaaatacaaaaaaatttagccaggcatgatggcacacgcagggattcccagctaccttggagctgaggcaagagaattgcttgaatccaggaggtggaggttgcagtgaaccgagatcacaccactgcacttcagcctgggcaacagagcaggactccacctcaaaaaaaaaaaaaaaaaaaaaagaatgcaccatttcgcctcatctctcagcatttgacataaccgatcattccttcttaaaacactttttttggaaaatatgggtggagccaagatggccaaataggaacagctctggtctacagctcccagcatgaacgacgcagaagacgggtgatttctgcatttccatctgaggtaccgggttcatctcactagggagtgccagacagtgggtgcaggacagtgggtgcagcacactgtgtgcgagccgaagcagggcgaggcattacctcactcagtaagtgcaaggggtcagggagttccctttcctagtcaaagaaaggggtgacagacggcacctggaaaattgggtcactcccaccctaatactgcgcttttccaacgggcttaaaaaacagcacaccaggagattatatcccacacctagctcagagggtcctatgcccatggagtctcactgattgatctcagactgctgtgctagcaaactgcaaggcagcagcgaggctgggggaggggtgcctgccattgcccaggcttgcttaggtaaacaaagcagcctggaagcttgaactgggtggagcccaccacagctaaaggaggccttcctgcctctataggctccacctctgggggcagggcacagacaaacaaaaagacagcagtaacctgtgcagacttaaacgtccctgtctgacagctttgaagagagtagtggttctcccagcacgcagctggagatctgagaacggacagactgcctcctcaagtgggtccctgacccccgagcagcctaactgggaggcaccccccagtaggggcagactgacacctcacatggccgggtactcctctgagacaaaacttccagaggaacgatcaggcagcagcatttgcggttcacgaaaatcggctgttctacagccaccgctgttctgcagccactgctgctgatacccaggcaaacagggtctggagtggacctctagcaaactccaacagacctgcaggcgaggctcctgtctgttagaaggaaaactaacaaacagaaaggacatccacaccaaaaacccatctgtacgtcaccatcatcaaagaccaaaagtagataaaaccacaaagatggggaaaaaacagagcagaaaaactggaaactctaaaaagcagagcacctctcctcctccaaaggaatgcagttcctcaccagcaacagaacaaagctggatggagaatgactttgatgagttgagagaagaaggcttcagacgatcaaactactcccgagctacaggaggaaattcaaaccaatggcaaagaagttaaaaactttgaaataaaaattatacgtatgtataactagaataaccaatgcagagaagtacttaaaggagctgatggagctgaaagccaaggctcaagaactatgtgaagaatgcagaagcctcaggagccgacacgatcaactggaagaaagggtatcagtgatggaagatcaaatgaatgaaatgaagcaagaagagaagtttagagaaaaaagaataaaaagaaacaaacaaagtctccaagaaatatgggactatgtgaaaagaccaaatctatgtctgattggtgtacctcaaagtgacagggagaatggaaccaagttggaaaacactctgcaggatattatccaggagaacttccccaatctagcaaggcaggccaccattcagattcaggaaatacagagaacgccacaaagatacttctcgagaagagcaactccaagacacataattgtcagattcaccaaagttgaaatgaaggaaaaaatgttaagggcagccagagagaaaggtcaggttacccacaaagggaagcccatcagactaacagctgatctctcagcagaaactctacaagccagaagagaaggggggccaatattcaacattcttaaaagaatttccaacccagaatttcatatccagccaaactaagcttcataagtgaaggagaagtaaaatcctttacagacaagcaaatgctgagagattttgtcaccagcaggcctgccctaaaagagctcctgaaggaaacactaaacatagaaaggaacaacctgtaccagccactgcaaaaacatgccaaattgtaaagaccatcaaggctgggaagaaactgcatcaactaatgagcaaaataaccagctaacatcataatgacaggatcaaattcacacataacaatattaactttaaatgtaaatgggctaaatgctccaattaaaagacacagactggcaaattggataaagagtcaagacccatcagtgtgctgtattcaggaaacccatctcacgtgcagagacacacataggctcaaaataaagggatggaggaagatctaccaagcaaatggaaaacaaaaaaaggcaggggttgcaatcctagtctctgataaaacagactttaaaccaacaaagatcaaaagagacaaagaaggccattacataatgttaaagggatcaattcaccaagaagagctaactatcctaaatatatatgcatccgatacaggagcacccagattcataaagcaagtcctgagtgacctacaaagagacttagactcccacacaataataatgggagactttaacaccccactgtcaacattacacagatcagcaagacagaaagttaacaaggatacccaggaattgaactcagctctgcaccaagcggacctaatagacatctacagaactctccaccccaaatcaacagaatatacattttttttcagcaccacaccacacctattccaaaactgaccacatagttcgaagtaaagctctcctcagcaaatgtaaaagaacagaaattataacaaactgtctctcagaccacagtgcaatcaaactagaactcaggattaagaaactcactcaaaaccactccactacatggaaactgaacaacctgctcctgaatgactactgggtacataatgaaatgaaggcagaaatcaagatgttctttgaaaccaatgagaacaaagacacaacataccagaatctctgggacacattcaaagcagtgtgtagagggaaatatatagcactaagtgtccacaagagaaagcaggaaagattcaaaatggacaccctaacaccacaattaaaagaactagaaaagcaagagcaaacacattcaaaagctagcagaaggcaagaaataactaaaatcagagcagaactgaaggaaatagagacacaaaaaaaaaccttcaaaaaattaatgaatccaggagctggttttttgaaaagatcaacaaaattgatagactgctagcaagactaataaagaagaaaagagagaagaatcaaatagatgcaataaaaaatgataaaggggatatcaccaccaatcccacagaaatacaaactaccatcagaatactacaaacacctctatgcaaataaactagaaaatctagaagaaatggataaattccttgacacatacaccctcccaagactaaaccaggaagaagttgaatctctgaatagaccaataacaggatctgaaattgtggcaataatcaatagcttaccaaccaaaaagagtccaggaccagatggattcacagccaaattctaccagaggtacaaggaggagctggtaccattccttctgaaactattccaatcaatagaaaaagagggaatcctgcctaactcattttatgaggccagcatcatcctgataccaaagcctggcagagacacagccaaaaaagagaattttagaccaatattcctgatgaacattgatgcaaaaatcctcaataaaatactggcaaaccgaatccagcagcacatcaaaaagcttatcccaccatgatcaagtgggcttcatccctgggatgcaaggctggttcaacatacacaaatcaataaatgtaatccagcatataaacagaaccaaagacaaaaaccacatgattatctcaatagatgcagaaaaggcctttgacaaaattcaacaacccttcatgctaaaaactctcaataaattaggtattgatgggatgtatctcaaaataataagagctatctatgacaaacccacagccaatatcatactgaatgggcaaaaactggaagcactcactttgaaaactggcacaagacagagatgccctctctcaccactcctattcaacatagtgttggaatttctggccagggcaattaggcaggagaaggaaataaaggttattcaattaggaaaagaggaagtcaaattgtccctgtttgcagatgacatgattgtgtatctagaaaaccccattgtctcagcccaaaatctccttaagctgataagcaactacagcaaagtctcaggatacaaaatcagtgtacaaaaatcagcagcattcttatacatgaataacagacaaacagagagccaaatcatgagtgaactcccattcacaattgcttcaaagagaataaaatatctaggaatccaacttacaagggacgtgaaggacctcttcaaggagaactacaaaccactgctcaatgaaataaaagaggatacaaacaaatggaagaacattacatgctcatgggttggaagaatcaatatcatgaaaatggccatactgcccaaggtaatttatagattcaatgccatccccatcaagctaccaatgactttcttcacagaattggaaaaaactactttaaagttcatatggaaccaaaaaagagcccgcattgccaagtcaatcctaagccaaaagaacaaagctggaggcatcatgctacctgacctcaaactatactacaaggctacagtaaccaaaacagcatggtactggtaccaaaacagagatatagatcaatggaacagaacagagccctcagaaataatgccgcatatctacaactatctgatctttgacaaacctgacaaaaacaagcaatggggaaaggattccctatttaataaatggtgctgggaaaactggctagccatatgtagaaagctgaaactggatcccttccttacaccttatacaaaaattaattcaagatggattaaagacttaaacgttagacctaaaaccataaaaaccctagaagaaaacctaggcaataccattcaggacataggcatgggcaaggacttcatgtctcaaacaccaaaagcaatggcaacaaaagccaaaactgacaaatgggatctaattaaactaaagagcttctgcacagcaaaagaaactaccatcagagtgaacaggcaaccaacaaaatggtagaaaattttcgcaacctactcctctgacaaagggctaatatccagaatctacaatgaactcaaatttacaagaaaaaaacaaccccatcaaaaagtgggtgaaggatatgaacagacacttctcaaaagaagacatttatgcagccaaaaaacacatgaaaaaatgctcatcatcactggccatcagagaaatgcaaatcaaaaccacaataccatctcacaccatttagaatggcaatcattaaaaagtcaggaaacaacaggtgctggagaggatgtggagaaataggaacacttctacactgttggtgggactgtaaactagttcaaccattgtggaagtcagtgtggtgcttcctcagggatctagaactagaaataccatttgacccagccatcccattactgggtatatacccaaaggactatatatcatgctgctataaagacacatgcacacgtatgtttattgtggcactattcacaatagcaaagacttggaaccaacccaaatgtccaacaatgatagactggattaagaaaatgtggcacatatataccatggaatagtatgcagccataaaaaatgatgagttcatgtcctttatagggacatggatgaaactggaaatcatcattctcagcaaactatctcaaggacagaaaaccaaacaccgcatgttctcactcataggtgggaattgaacagtgagaacacagggacacaggaaggggaacatcacactccagggactgttgtggggtggggggaggcgggagggatagcattaggagatatacctaatgctaaatgacgagttaatgggtgcagtacaccaacatggcacatgtatacatatgtaacaaacctgcacattgtgcatatgtaccctaaaacttaaagtataatttaaaaaaacaacaacacatttttcacatggcttctggggttccgtgctctcttaatttttctccttcctcaatggctattccttcttagtctccattgctgtttccttctcatctacctgaagtgacccagggttcaatcctcaaacttccctttttcatccttccccttctgttttgtatataaaggtacgccctgggtgacctcatcaaatcttgtagctttaaatgttatttcgtgatgactttcaaacttatatttgtaatccagatacctccccagagtcacatacttacacatttgtgtctattgaacatcttcatttgatatctaatagttcaaaaccagacttttcacaatccctcccaggtctgccccatcacagtgaggagttctcagtaagtagcacttccattgttccaacctttcaggcaaaacctgcatagtcttccttgtcttctcttttcatgttacatgtccattccaccaacaaatcctctgtagtataccttcaaaatatatccactatctaatgatacctcacttcctccacccttacctccaccatcatctggtctgagtcaggtggattattgttgtagccgcctaatttctatccatctagcttctgtactttcccattaactatctttgtatttactaattttggctccccaactcagagtaaaagtcgattttttaaagatggctgagactgaggtcagatggattttttcctgtctctgaactttaggccttgaataggttccaattttgtaaaatggtttatttctaatccctgcccttttgtgggtgaaggccttgtctcttgaattttttcagaacactaagatacaaccttaggctattgaagccagcaaatgtcccaagggtagctctaacttcagagcatgttcacctctccagtttctggctctcagctctcacttcattgcttgacttctttattttcttttactcttgtctttttttttttttttttttttttgagcggagtctcgctctgtcacccaggctggagtgcagtggtgcaatcttggctcactgcaacctccacctcctggttcaagtgattctcctgcctcagcctcccgagtagctgggactacaggcgtgtgccaccatgcccagctaatttgtgtgtgtgtatttttagtagagagggggtttcacgagtgttagccaagatggtctcaatctcctgacctcgtaatccgcccgcctcagcctcccaaagtgctggtattacaggcatgagccactgcgcccagccttaatcttgtctatatttttaaaaggatgtttgtcatattttacccaccatttattggtgtttgttaagaaatctgatataccattcagataccaactgtatccacctactgtcacagtcataatatacaacagttctattaaccatccctaaattccctcatgctttcttctttcattgtcaacctctcccctttaaccattcccagcctatgaaaaactactcaccaaattccatccatatagttttgctttgtcaagaatgtcatataaatagaatcaaaatatggcttttctcacttagcaaaatatatttaagatttatccatattgttgcatggatcaatttgtttctgttattgttgagtaatgttgcatgaatcaatactttgtttctgttattgctgagtaatgttccagtacctggaatggccaaagtttgctgattcattcgccttttgagggacatctggtagttccagtttggagcacttctgaataaagctgttataatctttgacatatagatgtttgtgtgagcataagtgtaaatactaatgtgactgctgtatcatatgctaaatgtatgtttaacattataagaaactaccacactcttttttaccatagttacagtgttttgcactctcagcaacagtatttgagaatttttgtgttctgtttcttgatctgtatttctaactgaaatattctttatcactatagactccttcccttatattggataattgttttttttttctttttctttttttatgagccagagtctcgctctgttgcccaggctggcttgctagtggtgagatcttggctcactgtaacctctgcctccctggttcaagtgattctcctgcctcagcctcccaagtaattgggattacaggcacctgccaccacacccagctgattttgtattttgttttttttgagatgaagtcttgcactgtcacccaggctggtgtgcagtggcatgatctcggctcactgcaacctccgcctcccaggttcaagcgattctcctgccttagcctcccgagtagctgggattacaggcacccgccaccatgcctggctaattttttgtatttttagtagagacgggttttcaccatgttggccaggttggtctcgaactcctgacctcaaatgatccacctgccttggcctcccaaagtgctgggattacaggcatgagccactgcgcctggcatgaataattgccttttttctctccaacattccatgagattatagaaccctttcattacgttatagacctgtagtagtgcctgggaactctaggatgtgttcttcccagaacacacagaattgtccttgaatagacaagtaaataagagaagacatgaggcaaggcatgaagaaacaaaggaaactgtgaagtaaggataagtaaaagcaacttagtatcctatttgaaagggatagagagagctaaagagcaattggagaggcatataggatcatagatttagtatggaggtgcttttgtttctatgtgtaaggaagttatagggaaaccacagatcactggtttctaggcatgtaccactagggtggtatgaagggttgattacagagaaacaggacaagggtatttaggagtgacagaagtatgacggtgggtggatacatgatttgtgtccttataagtcaaagtttcttttgttttttctcctgtttttcattcacctggtttttattgagtgctttcattacctagtttttattgagtgctagacatcacaaagaaaagttataaggtttcagtccttggataacattatacaaaatccaataaagatttaagtttgctatggcaagcagtcttgaatcaccataatccaaatttttgaaatttgagctgattcaaagatgattcagacttcagactctgtccagattggtctactgtttctcctttattcctcagtatagctctcagggttcccaacccaaagtataaagaattcatggcaggccctatcctccagttattgttgcccagccctgtgacacagtccaaaacactgtttagtttctccccctcttagctttttctagaatcataagacttctctaagtggaaatgtggacccagatgttgggcttatctctttgattttcatatttttcaatttttagccacccactctttattatgtaaacgctccagtggcttcactcaggtgccttttataatttgcttaatttgtataattgctatcatctagaaggttggtctaaattacctaaattaccagaaattaatgtttaagatttaggggctgataattaaattaagacctgaagaatgaggaagagtgtttgtatagtctcatccagagcagtccaaagaaatggaataggctctggctagcttttaattgaaaaaggtctgtgactttttcagagttgaaaggaagctagtttttctggcaaataaggagcgaagctgagaaggctcaacagatacataagcaaggagaagaccatggaaggggaaataagtcaaagtcattgaagagtttggattttatattaatatggaagctactaaaaagtattaagcagataaagaaaatcattatctgaatctgaatcagttgataggaaggattaaaattacagatctccaggatctttttctgattcactagcagttagtctggtgtaatgttggacagctataattttaacatgctccccaggtgattttgatccccaccaaggcttgagaactactcactttaaaattgttcttaatctcttcccttatcttctcaagtgagttttcattattctctaatctctcagatgcccctttcatatattaatatatgagatccttcttagctaattttttttaaaattctagataggaacattactgtaccatgaaatcagtgtagtggggtttgtctgcatgtgtatgagacagagaaattgaaaaaagtagaaatattgcagaatagaatagaaagcagggaagatactgttttatgaaactgtatatatatagtaggttgtgatgtgaaaggtaggtattatatgtcataataatcaatatttgaaacaaactcatgtatgtctgttatttcttatgggcattattttcctattatttgtcttttctatagaagttatatttctcaatttttttattctctcttatctttcagacttgccttcaaggtgtgcaagtaaggacttatctccagaaaagaacacttatgaaacagaattatcccaatgggaaatgagtgacagacttgaaaactgtgatcttgaagagtccaattccagggattatttggaagccaaaggcaagatggagaagcaacaagaaaatcagaaggaatatttcaggcaagggatgatcatatatgacaaaatgtccattttcaaccagcatacttacttatctcaacattcaagatgtcattctactgagaaaccctataaatgtaaggaatgtgggaaagccttcagacgagcctcacacctaacacaacatcaaagtattcatactggtgaaaaaccctatgaatgtaagcaatgcgggaaggcctttagtcgtgattcacaactcagtcttcatcagagacttcatactggtgagaaaccctatgcatgtaaggaatgtgggaaggcctttactcaaagctcacaacttattttacatcatagaattcatactggtgaaaaaccatataaatgtgaagaatgtgggaaagcctttattcgtagctcacaacttacccgacatcaaaaagttcatactggtgagaaaccttatgaatgtaaagaatgtgggaaggcctttactcagaattcacaacttacactacaccagagacttcatactggtgaaaagctctatgaatgtaaagaatgtaggaaggtctttactcagctctcacaacttattctgcataagagaattcataccggtgagaaaccctatgaatgtaaggaatgtggaaaagcttttatttgtggctcacagctttctcaacatcagaaaattcataatggggaaaaaccatatgaatgtaaggaatgtggaagggcctttattcggggctcactactgatgcaacatcagaggattcatactggtgaaaaaccctataaatgtgaagaatgtgggaaggcctttatccgtggctcacaacttactcaacaccagagaattcacaccaatgaaaagccctatgaatgtaaggaatgtggaaagatgtttagtcatggctcacaacttactcaacatcagagaatacacactggtgagaaaccctatcaatgtaaggaatgtggaaaagcgtttaatcgtggctcactccttacacgacaccagaggattcatactggtgagaaaccctatgaatgtaaagaatgtggaaaaacctttagtcgtggctcagaacttactcaacatgagcgaattcacacaggtgagaaaccctatgaatgtaaggaatgtgggaaatcttttattcgtggttcccagcttactcaacatcagagaatccatactggtgagaaaccttatgaatgtaaagaatgtagaatggcctttactcagagttcacatctttcccaacatcaaagacttcacactggtgagaaaccctatgtgtgtaatgaatgtggaaaggcctttgcgcgtggcttactacttatacaacatcagagaattcatactggtgagaaaccatatcaatgtaaggaatgtgggaaagcctttattcgtggttcacagttgactcaacatcagcgaattcacactggagaaaaaccctatgaatgcaaggagtgtggcaaggcctttagtcatggctctcagcttactctacatcagagaatccatactggtgagaagccctatgaatgcagagaatgtagaaaggcctttactcagagttcacatctttctcggcatcagagaattcatactggtgagaaaccatatcaatgtaaggaatgtgggaaggcctttactcgtggttcacagctaactcaacatcagagaattcatatcagtgagaaatcttttgaatataaggaatgtgggattgactttagtcatggctcacaagtttacatgtgaattgtctgattatttgagatcactatgaagaggttctctggttgttagcagcaaagaattctcacaaatgtgaatatgggcgcacatttgcctcataaagcacagcatcagataatttatgtgagagaaaatggtagtgtcattcatatagaaaaacatcattactggaaacctattaaacattagcaaattggagaatagttttaatatagtaaatgtaggaagccctttagccatattgaaaacaaatatctttttcaacgttatcttagctctactagttgatctttttgttatatgtatcatgatacttaacctctaccttggtttaatcattttaagatagacctaagtatattacctttattgtaagattcttggaagtattatgtaagttattacatgtaaaagctcttagaatggtgccttgaacgtagcataccacaaatattagctaccattttcactagtgttattttagagaatttgcatgagaggagagtacttatgagtataatgaatattgagaaatcttttatcaacacatccaagatgacttggttggggggcactgtatgccataatgaatgtgagaaagctgtcatttaaatctcatccattattgctataagaggaaattcatactgttaaaaaaaaaaaaacccagtggatataatcagtgtattattaaaaaaaaaaaaacccagtggatgtaatcagtgtattattgagcacagctgttagagaagtgggacaaggtgtgaagtgatttttaacgaagtctaagatccaaagtctaataaatctaggaattttttaaaaacttgaatgtattgcttttgaagtaaacaaaataactgatattacagactattttgcaatgaaaaatgatgagagtttgtgatacagactgcttttttcctaccctatatctattttctcttttttagtaacaaatttctgggctgaaaatctcagccttccttgcaggtcaacaagatagaagtgatatttatatgagtaggagatttacgaaatccatttttcctgtctttttttccgtgcctacaatgtggacatctaagctggagctccgttactctcatggggactttgagaatggtatctgggtgttatggatcatggagcagaaatacagaaggagtctgcaaccctgatgactttgtggaacagccatactagctctggtctgcttgcctcctgtttctctttaaataaaattaaacatcttatttgttgatgctattgtagttctgttattgacaataaaaattcttaaggatataaaattttgtacctggaagtgggatgctatgggtaaaagaaatctcaaatggggtattgacttagggccattgagaatgaggaactgcccaaattaagctaggaatttgaagattcttgttttaataggcaggatgttttgtcactgcctcccactcttacaagcatgctttatatcagttgatgctataatgttagaggaaatgctagaagtgattcagaatatgtgtgttgcatgtttcttgctgctttcagtaatgtcttgtgaacgagataaatttagagtagagctaggcagcccactagcagcaattgaaagcaatattgctttggtaagatgttatctatgatggcaagccctcaatcctccacccttaatccacttacagtgatttaatgtgacaacctgaacaagaaatcagaccactgccaatgcatacaaaggcagtctgctagtaaatatggttatgttttcctcacaggagcctattgttctaaaagtagtcagttattaggtacttaatatattccagccactatcttaggtgttttggatatttgtcagtgaacaattctaacaggaggagataatcatacacacagagtatgttagaatataagtgttatggggaaaaagtcattgaaaagacaatgggagggatatgatcatttagattgctttgtgaaatacagtgatcaaggtagaccatcaagaaggatagacttgagccaagacttgaaggagtgtggtgattccaggcagaggagagaggtcctacaatgggactacactgaagtgttttaggaaaagtggagaagttattgaagaacactgtgcaaagggatggttgctagagcagaactgagagataacagagagctatgtcttgccaagcgtgcaagccattggaaagatactttattttgagggaaacacaactgttgaaaaaaatcgatgaggaggttgtagtaactcagatgaaagaggatgtcatggcttcggaagaagaggtaacaatgggtatagtggttattggttgtattctaggtatatagtaaatgtgacagcaagcaagatttgtttaagggctagatgtaaaagagacaagtctagggtgactttaagtcaaagattttagtcttgagcatctgggaatacaatgttttcatcaaccaggatggagaaaacttcagttccagggttttaggggaagattgagagttcaactttgaacatgttgaatctgtagatgtcttttaagacacaaaatggcagtagtgagtaggcacttcatgtatgagatatacctaacttggtattatattactttagtaggtattgcccatatttatttaaatgattagggttttagtatagaaaaggtaaagaacagcaaggactgaaccacggagcactccaacattaagagttcaatgataaaagaacaacatgaaagaagctaaaggccaggtgcagtggctcacacctgtaatcccagcactttgggaggctgaggcgggcgtatcacgaggtcaggagattgagaccatcctggccaacacggtgaaaccccgtctctactaaaaaaaaatacaaaaaattagccaggcgtggtggcgggcgcctgtagtcccagctactcgggaggctgaggcaggagaatggcgtgaacccaggaggtggagcttgcagtgagccgagatcgcgccactgcactccagcctgggtgacagagtgacagtgtctcaaaaaagaaaaagaaaaaaagctaaggaggagaaccaataatagaggaaaaccaagaaactggaatcacaaaagccaaataaaagtgaattgaaggagaatcaacaggtatcagatagctttggcagactgattatacaacacgaggtttgaaacggccattgaatttatcagtatccgtgtcagtaactttgagaagagcacagggttttttttctttgtttatttctggtgtattgactttggagtgatagaagcaaaagcttgaaaagatagttgaggatgagtacagagaacactgcatgagggacacagcaagccacaggcacatctgttagcccagcctccaggtaacagtggaaaccctgcaggagagtcacatgcacaccctcagatcagtctgagggaaggatcccatgttgtatcctttgctcctgaagttttctcagcctggtcagcttcctcaacacctagaatccctggaacttctgcttgacctcctgaaggaaataggccagagcctaaactcaatgcacagctgcagagttcctggatccaatgctgcaaggacccatccagggcaaccacagaggtcattgagatgcaaattcactgctagtgccatgtacgtgtgcaattggaggatcagtttgaacttccagacaccaggctcacacagatgcaaagagaagggtggagctggtgccagaaaaagagctggctgctatcttcccttactcaggtctgaataaccacaactgggtctccttggacactctattaaaggacaaaattagggcttaaggtatgccctctggactcccctttaaatcagaggcaaacagcaaataatgcaaactctaaaatacccaaacaggaactataatggaaaaaaaatcacaagctgagggtcaaacagaaatacaggaataggttaaatagaagaactgcagacctgaaaaggcttgacgccagtgcagtcacaaagggaaaaaagtacatatcactcaagaaggaaaagaaaaatgtcgatgaaattaaacacaatgtttattagaacgacaagactggctataactggataatcatcttgtgaatagtgaagccatctgaataggcacagacagagttagcttgttggtaaaagtaatggaaacccacaactccataataatcacacctgcccaatcattaacaaataaatgtggagaaagcagcactatagaaatggatccccaagaatgttggccctgatgaactggaaaattatttttgttgataagattgagcctgacaaaaatctagacccatcagaaatagggaagacaaaaaaagacggcggtcatggaacaggctagagctcacccatgataaatcacagccaactaccatatggaactgggaacaaatgcaaaatgaagactatttcactagacaccacacatagacacacaaaaagacaaaattacattcacacacacagacatacaacagtgacacagaaacacacactcaggcagctcctgaggctgcagggttctgctgtctgtgatgaagtccctttaggaaaagagcagccttgagacacaggccagtcctcaaggtgacaagagggacaacttttggggagactcacccgcacactgtctaggcgggcctgaggctgggatcccgtggtgaatttctggggctccccttgatgtttcttcagccctccatgatgcctaggatcccaagaccatcctgttgaacccctggagaagacaaaccagagcccaaggccaatgaactgccacagagggctcctgctccggtggtggaggaaaagaggttgcacgggacagaaggcccgtcctagccatcctgtcctcaacccccacttcactggacttcttcctgagttcctggtggaggaagagcttcagggcaggagattggtactccttactcctctttggatctgattctggattggatgctgtgggcagaaattgggtcagatgggggtgaaaataaaatcagtgaggtgtggaaggggctgctggggcacatagacacctgagttccccagggaaggtatcagcgaaaaattcactgacccatgagcccacttcctcccttcaacctggccctagcagggccctgccctggcctcaaagcccaggggctcccgcttgtcaccactgtccaggaaatgtggaaatgaggtcaaatgcaaggtggggctaaggcaaccacacctggaactatcattccacaggggcagatgggttgggagtgtgtctctgaggcagctggggtaattccaggacagacagtagtgtccaggcatgctatcaaggggcactgaggacccccaagaaagcaaagaagaatcaaaggactcctgagactaaaaaagggcctgtgctggagtccaagccacctttggggattcctgccagaagacccacgaggtttctgcaaagtgtacccatgctcaactccaacacgggggacccctaacacagcctcacctgtatccagccaatccccagtcccttttattcaattaaaaaaataagtggcagccaaaggattcagtgctggaaagcagtctcatccaggaacaggggagttagatatccctcaagagtgagaaaatggaaacaaaatgcaagacaacctcaattagaaggcaaaggccagccatgggtgtctacctctcatcctgtgtgaatcacgcagccatctgattggatattgtgagcaattgtctttttgttttttgtttttgtttgttcgtttggtttttggtgaaagctatgaaaacctagagctccatgatcatcacacctgcccaataattaaagatgtgtggagaaggaaacactcatgaaatggaccccccagaatattgtccttggtgaactgggaaatattttttgttgataagattgagccagaccaaaaaaatctaggcccatcaaaaatatggaagacaataaaagatagagggcatagtaagagaacagaggcaatgttggggaaattactaccactgccatgtggatgcaggaatgagtgcaaaactcgtgacctagccagaaaggctgcagtttgatttaaagagattgttcacacgttattgtgttcttctcaatattgaatcatggtgagttttcatgcgactattaagggaaaggaagaatggagttacaagcatcttctttgacatctgactacaccactcctgctcatggaaaacgtgttcctgtgaggtttctgttgttggatgtggtatcgtcaccttattttagaaaagttggcctctccagagacaaggctatttttattcctcctggtgccaagcaggcccccacctcgcccaggccttaacaaaacacaagctggaaccacacagaaaacagattacacacagcccaagcagaaacacaaggagaggtaaaccaaaaggaagcctgacgaaagaaaccccctccagtgcacaaggcacatttgtcccactagataccacaaagagaagacacacacacaaacacatcccacacaaatacacacacagatatacaacacttacaaagtgctgaccagctacagccagtttggaccaataagtatcggtttatgccagttctaatttttcatcgctggttctgactggtttagaatggcttcaactggccagaacctatttagtgagactatagtgaatttgaccagcttggacctgttttgactggccaaaatcagtttatgccagttctggtctttgttggttttgaccagattagactcatttcaactggccacaactgttttatgcccagtaaaaatggcctcaacaggttttgaccactttcttatatcatctatatccttatgtaacccttgttattttttatgagagacttcttaccaaatgagggacacaagaaatattagaacttgagcacacaaacaagaaccactcataacctacaggagaattatcattattgtagatgaaagaggaccttccacattttcccttagaccttagaatctttttcagtctttcagtgtacaattttgagcacgtgtttttactggttttcacaatctggaattgttttatgccaattgtgatcagtctaagttggttctgaccagcttagaccagttccaactggtcaaaactggtttgtactgggtattactggccttgaccagcctgaaccagttttgattgggcaaaatcagttcatgcctattccaaatggtcttgccatttctgaccagtttagatcagttcctctggccaaaaatgactgatactggctctgactggctacaactggcttgaacaaataagcaccaatttatgccacttctaatttgtcatagctggttccaaccaacttagaatggtttcagctggctacaaccactttagaggggcttataattagccttgaccagcttgcacctgttttgaccagccaaaatctgcatatgccagttctgactactcttggccagttccgaaaggtttacactgatttcaactggccacgatcagtatagatggagtataacaagcatcaacaggttttgatcacttcaatgtagaatctatagcatcacataggccttgttagtttctttttgacatatttcttacaaaatcagagacaactagacacacaagcaagaaacactcaaaaccctttgaagaaagtttcactattgtagattaaaggagaccttcaatgttcccttagacttagaatactttccctctttcattgtgaaaccagcccaattttccaacaagctggatgtccataaaactgaagcttgagaaacttacatttgtacaatgaaatacatttgctgcttgttgaccaactcctttccccctgtttttattcggggctatataaacccttaactttagtcaaggaggagggatgaatttgaggtttggctgccatctcacaggctgatgtcacctgtgcaatagtaagcctgcctccctggcaatactcaactcactgattggctttttgtgtattgaccagtgggacccaaacataacccctggtgtttggtaacaattgtacaattttgagcactggttttgactagttttataagccagaaacttttttttttttttttagatggagtctcacactgttgcctaggcttgagtgcagtggcgcaatctcggctcactgcaacctctgcctcccaggttcaaacgattctccttgcctcagcctcccaagtagctggaattacaggtgcacaccaccatgcccagctaatttttttgtatttttagtagggaaggggtttcactatgttggccaggctggactcgaactcctgacctcttgattcacccgcctcagcctcccaaaatgctggaaatacaggcatgagccaccatgcctggccaagccagaaacattttatgccaggtgtgactagtcttggctggttccaatcagtttgggtcaatttcaactgactgcaaacggttaagactggctctgagtggctgcaaccagtttgaaatgaccataattggttaatgctggttctgactggtcatgtctggttccaaatggtgtagattggtttcaactgcccaaaatctgtgtagctagtgtaaaaggaaaataaatatcaggaccccaaaatcactaaaccaaaggaaaaagtcaagctgagaactgcatcaggcaaaccctgtctcccattttatttctaaatacgatagctacaaagataaaaaactattatacatacctccctcacaatttgtccacaagaaaatttcttgtgggcctcaagatctttaccctaaaacagtgctgttgaatttaaccctggtaaggtaacttgatagtttatcttcacaggtgtgagacaaagaacagaactcaatcatccctctgctcacctgagacaaatgcacatctgattgctttctctgccctattgtttatgtaaaaattcagattcactaagccagactaaggattcagtaaaaggctaatcagagactcaaaagaatgcaacaacttgcctcttagctacctatgacctggaagcccccacttcaagttgtcctgtatttccagactgaaccaatgtataccttacacatactgactgatgtctcatgtctccctaaaatgtataaaaccaagctgtgccccaaaaaccttgggcacatgtcatcaggacctcctgaggctgtgtcatggggtgtccttaaccttggcaaaataaactttctgaattgattgagacctgtctcagatactttgggttcacaacaggctacatctggccttgactggcttggactggttttgactggccacaattggtttatgtcagttttgactggtcttggccatttccaacaagtttacaccagtttcacctgaccacaaacggttcagactggctctgtctggctactatcagttttgacagactgaaattactttattctctttctgatttgttatggctagctttgaccagcttttaccagtttcaactggccatgactggtttggatgagctataactggcattaaccactttgagaaccccttgagactttttcatttcagctattgtactccagaatttttttgttttctatttctttattgatatatctattttgttcatacaatgtgttctagccagttactgcccaaagaagtctacagtcaatgctattcctatcaaaatactgtcatttttcacagaaataaaagaaactactctaaaatttatacagaatcaaaaaggagtccaaataaccaaagcaattctaaacagaaagaacaaagctggaggcatcacattacccaacttcaaactactataaagctacagtaaccaaaacagcatggcactggtaattaataaataaacaaataaaaaataaataaaacaaaacccacaaacccacatacaccaatggaacagaatagagaaccaagatataaagccacatacctacagtcatctgatctttggcaaagttgacaaaaataagcaaagcagaaagaattccctattcaataaacaatgctgggataactggctagacacatgccaaagaatgaaactggactctgacctttcaaaatataaaaaaattaatttgaggtggactaaagattaaatgtaagacctcaggccaggcgcagtggctcacagctgtaatccaagcactttgggaggccaaggcgggccaatcacctgaggtcaggtgttcgagaccagcctggccaacatggtgaaacgccgtctctactaaaaacacaaaaattagcctggcatgacggcaggcacctgtaatcccagctactcaggaggctgaggcaggagaatggtttgaatctaggatcagaagttgcagtgagccaagatcatgccaccgcactccagcctgggtgacagggtgagactctgtctcaaaaagaaaaaaaaaaaaaagacctcaaactataaaaatcttagaagaaaacctaggaaatacccttctcaacactggctttggcaaagaacttatggctaagtcctcaaaagcaactgcaacaaaaacaaaaattgacaaatgggacttaatgaaactaaagatcttctgcatagcaaaagaaattattaacaaagtaaacaggcaacctacagaatgagagaaaatattcacaaactatgcatctaacaaaggtctaacattcagaatctataaggaacctaaacaaatcaaacaaaaaacaaatcaatttaaaaacgggcaaaggacagacacttctcaaaagaagacatacgagtgtccaacaaacatgaaaaaatgctcagcattcctaatcatcagagaaatgcaaatcaaaaccacaatgagataccatctcacaccagtcagaatggagactgtaaaaaagtaacaggtgatgacaaggctgtggagaaaagggaatgcgtatacactgttagcgggaatgtaaatttagttcagccactgtggaaagcagtttggagatttctcaaagaacctagaactaccatttgacctgacaaccccattcctgggtatatacacaaaggaaaaatatatcgctctaccaaaagacacatgcactcatatgttcattgtgaatagcattgcagtgctattcacaatggcaaagacaaggaatcaacctaggtgcccatcaatggtgaactggataaagaaaacgtgttacatacataccatggaatactacacagccacaacaaagagtgaagtcatgtcattgatccagttggaggccattatcctaagctaattaacgtggcaaccgaaaaccaaataccacatgttttcacttataagtgggagctaagcattgagtgcacctggacataaagatgggaacaatagtcactggggatgactagaggagggagagagaaaggaggatgtgggctgaaaaacgacctgttgggtagtatacttactacctgagtgacaggatcatgtgtaccccaaacctcagcatcacgcaacatactcatctagcaaacgtgcacatgtacccactcaatccaaaataaaacttgggaaaaaaaagagaaaagcaactaaatgagtttttttgtagaaaacaaataattgggtcttatttttatatgcactttgacactttgacagtgtcttttagtgattgttgcatgtttctttttatgtacaatttgcatgcaacgaaatgcatacataaatcttaagtgtaccatttgctgttttgacaaatgcataacatgttgaatatttatgtttagcaaacctgttcagcatcaagctcctgccccaacacttcccagtctgcgcacggccactttgctggctgtaaccctttataaagtctccttgttttttaaatttaaatagtgtgtggccaggcatggtggctcatgcctgtaatcccagcatgtggggaggccagggtgggtggatcatttgaggtcaggagttcaagaccagcctggccaacatggtgaaaccccatctctattaaaaatacaaaaaaaattagccagacctggtggcatgcacctgtaatcccagctacttgggaagctgaggcaggagaatcacttgaacccgagaggtagaggttgcagtgagccgagatcacaccactgcactccagcctgggcgacagagtgagactccatctcaaaaaaaaaaaaaaaaacaaaacaaaacaacaactgtagtttttcttaaagttaacatatccatatcagtacttagtggcccatgaagggaaggtaaaaagggtagctccatttggtcctacctaattaatgtttcctctgtcttagcttgggctgccataacaaaattgcatatactcagtggcttaacaaaatggaacacaaatgaattttcttaacaacaaaaattaattttctcacagttctggaagctggaaagtccaaggtaaggtgccagcatggtccgcttttggtgagggctgccttcttgctacgtcctcatacggcttttcctaggtgcaggagacagagagagcgagcgagcctctcttcctatttttgtaagaccaccaattctaccagatgaggatcccacccttatgaacttaattaacttcaattacctcctaaaagctctatctccaaaatagccacattgagggttagagcttcaacctctgaattttggggggacacagtttagttcatagcaccctccaaaggatactcctctcctttgacatgtgtgatgttatccacaaccatcaaggggtggatagcgttcctgattataaaacttcagcatccaaaagcttggagctacccttggttctggaagcttccttacttttactttgaagttttcagttcccattgggagagaccctcatcccaactgtagatgaatcatttttcttcttggccaagctggagactgcatggaatcacttttattcttctgcaatatcattccaaagtcaggagagacagctttaaattacagcacctggctgagacctgggaagcttgccccatattcccgacattcctcactgtggccttccattgagtgactgcagctgactgccaattcccagaaccataagcttatgtttacaatcaaggactcttccacctgccttacacacaaactcagcagactcattttaattttttttagttacttttttttttttttagatggagtctcgctgtgtagcccaggctggagtgcagtggtgggatctcagctaactgcaacctctacctcccaagttcaagcaattctcctgcctcagcctcccgagtaactaggactacagtgtgtgccaccacgcccagctaattttgtgtgtgtgtgtgtgtgtgtgtgtgtgtgtgtgtatttttagtagagacggggtttcaccgtgttagccaggatggcttcaatctcctgatctcgtgatctgcccgcctcggcctcccagagggctgggattataggcatgagccaccgcacccagcccattttaatttattttacctcctacaggtggtcctgacacatacacactgaacaaacatgcgtgtgacatatgaaccatgttcactttggggtagagacacaacatttaaatttattacaattaggtcctattatatcaaaaggtcttttcaggtcaggaagccacacaagtgcgcagtgtgtgtatactagccaggaccagtctgtgctcagtggtcttttcatcaggagaaagttactgaagttagtctcttgtccagtcaaagctatagttatagctggtggaatagtgggtggaggtcagtcatcatctggtggagctgcaaattgttttaatattgtttatgttgaggccagtgcttgtttagctgccagagaggaaaaaaaaaaaaaccttgtggcagttagaggcagttagaacatactttattctttttatttatttatttatttatttttgagatggactttcacctcaccataacctctgccttctgggttcaagcaattctcctgcctcagcctcctgagtagctgggattacaggcatgcgccaccacacccagctaattttgtatttttaatagagatggggtttcaccatattggtcaggctggtctcgaactcctgacctcaggtgatcctcccgccttggcctcccaaagtactgggattacaggcgtgagccactgtgcctggccagaaaagaatttattccttaagtgtagggggatgtgacctatcccttgcctggcatggctttgcgtccagcttatgtcttattgccacaaagcatctgttctgtcaatcttatgatctctgttttaacattcatgttggtcagttgttatatttaaaccacaaaagagaggggtataatgaggcctgtctaaccttccatcctgtcatggctgggaactaagtatttaagagttttctgggggctgggcgcggtggctttacacctgtaatcccagcactttgggaggccgaggcagccagatcaccagaggtcgggagttcaagaccagcctgaccaacatggagaaaccccgtctctactaaaaatacaaaattagctgggcgtggtggcgcatgcctgtagtcccagctactcgggaggctgaggcaggagaatcccttgaacctcggaggcagaggtttcagtgagccgagattgtgccactgcactccagcctgggcaacgagcaaaactctgtctcaaaaacaaaaaaaaggagttttctggggtccccttggccacaagggggtccattcagttggggagtggcttaggattttaagtttataaatcttagggaaagactcccaggagaataagtgaagacataaagccatatcatggaaagatttaagtgttcatcactgttataataggcacagttataatattaaaataatgataataatgatgatgttaacaatgtcctcctcctatggggcggggatgcaggaatagccagccttctcaggagaagtattatggctacactattactactgtattactttataactacagcatgattacactataaccaagcctgggagtgatcacactaatgatggcctttcaggtgcagcactgcataggggttaatggaatggactctttagttggccagcccaggtttgaatttccctgtgctttttaaaagttttgtgatcttggaaaattcctttattcctctgtgacacattctttgtgtgggaaacgagtataataattgtgctcatctcaagcattaggaggactgaatgaacctagaacatggcctggtgcacattaaacacttaactaaaatttgctgtcatcattattgtcatcacaatcagcactgtgtactgggtaccacatcatttatgcttcacaaataccttataatgtgcggactatttccctctgggttacgagattgtcattagtcaacagtggtatcaattgcaatgataatggtaatataaatgcaaatgaccacaatgtcagtgtggtagccagcctccaagattgccctcaatcaatcttatctcctggtattcaaactccatagagtcttctttcacgataaatagactgaccactgtaaccaatactttcactatgtggtgaacacactcaagtattcttatggtgggttccatgtggtgagaaactgaggcctttcaccttctgctcatagtcacgtgagcttagaatcagatccaattagccccagttagccttcagatgactgcaattctagccaacatcctgattgcaacctcatgagagttcctgagccagaaccacctagctaaactgtgcctagatttccagtcctcagagagtatgtaggagaataagtgtttattattatgtcacgccactaagttttgagtaatatgttacacatagcgatagataattaatatggttgtcctagtctgtttgggatgctataacaaaatgcctaggctgggggatttattaagaagccaaatttattgctcacagttctgatggctgaaaagtccaagatcaagatgccaacacattcagcgtctggtgagagttgtctgcttctcagatggtgactacttgccgtgttctcgcatggcagaaaggaaaagaaactcccttggccctcttttgtaaggccatgaattgcattcctgaaagcaaagccctcatgacctaatcacctaccaaagactccatctcttaatattatctcagtgggaaactgatttcaatatgtaaatgtggtgggggaaggcacaaatttagaccattgcagcagtcgacgctgtattgtaaatgtgcccattttccgcaatataatagaacacaccatgggttttcaggattggcatttattataggcacaaacttaatataactcaaatgattgtactaatgtgcttcttatattgtcctatttcacaaatgtaaacagagagcacaattttttgttttaatagcagcattccttgttataataaatattaaaataacaccataataaaatcactaaggatgtaacctaattgtgctgatttcacagagggtggaaaacatcagcccaggggtgggactactgtgtttatataatacaaacacctgaaggtggcagaaactagcagagacagaggatttcttagcatcagaattgatatgttgttatttatgatatcttaataatttagaggcatataataatgacaaggattctgatatttgttataaagtataattgtgttgattatatttaaaaccattaatagaaacaatataattatagaattaagtaaaactgtaagtggtatgctatggcatggtgtacggtatggtacggtatgaggaatgtggagtagagtgtggtggggaggtgtaggatataccataaatagtcacactgggttgggcgaggtggctcaggcctgtaatcccaatgctttgggtggccgaggtgggcaaatcgtgaggtcaggagattgagaccatcctggccaacatggtgaaaccccatctctactaaaaatacaaaaaattagctgggtgtggtggtgggtgcctgtaatcgcagctactcggaggctgaggcaggagaatcacttgaacccgggaggcagaggttgcagtgagccaagatcacaccactgcactccagcctggcaacagagtgagactccatctcaaaaaaaataaaaataaaaaatagtcacattggcactagtagcccatttgagagctgagggtggagggtgtgattcatcctggcattatgggaagtgtccatgacaaccttggctttaagctgactttggccacggggtcaatgtctgccacactgcatcacatccattatccaacaaggtgcctgagccccagaaccctcagccctgccacattcctcttgctcctggggttctatattttccagtggctgctccagtggaggaggtggggcaggtgacactgacaatggggtgcaggatagaaagtgctaggctagatgctgatgggagtggccccctgcctatggatcccccactcctgcccctttccccctctatgtgacctgccactgtgaccaggaggaggctaagttagatcttgtaaacagtgtggaatgtatgtaggtaggatactcagtttggtactgccctgacatggagttagagctgggtgtgctggaccatggtgggaggaggcattaaatcttgaattagaggacccaaacccaccccaccaacttccccacacatgttaccaatctgtgcggggcatctggtcaacctcgatattattgctattattcattcatccatttaacaagcttgtactgagcatctgctttgagctggcaccgtgctgggcgcctggtatacagcagaaacaggacagacaaagtctggttctcatgaggctgatggtccagtggggaagagggatgagaaaccaaaaaaaggaatattgaatcaggtcagatagtaatagtatttgcaatgcaaatatcatacaaaataagggagcagcaagtgagctctacagatgtgttacttcaatggcaggataagatggggatggaggcactgcaaaggtggaagaggaaagcaagatgcacgggcactggagaagcagagcactctcagaacagtcggtgcaaaggcccaaagccagagaaaagatccttgatgttaaaacagccagaattgagatgcctgacaaataaaaatgttgactaactccaactgcagactctctggcctcttttattgtagttatatctttacactacaaacattaaatgcaactacgtgaaagtagaaataaccaaaatattatgtgaaagtttgatatgtaaaatattaaaattaggtaatcatataaaataaaacatatactataaaacaggtactattatataaaatacaaactattttattgtcacaaggaatatacagtaataaatattacaatatgctatataacatactgtagacacaattttctatagtatgtaatgacaggcacatataaaattaaaatatataaatctagtttttacacttataaatcttttatcaaatgtaattcaagttatcacatggtttacctaaaatacaacagcacttttgagattcatccatgttgtagtaagtgtcaataaatcatttctttatgtctgagcagccctccatagtattggtgtacacaatttgtttaatcactcatccactgatgtacatttgtgttacttcctaatttgggcaattatacaattgctgtgaacatctgagtataggttttcatgtaaacagaatttttctttcatctagggtaaatacctaagtgtggagttgctgagtcatatgataaatgtatggttaatagtataagaagctgccaaacttttgtgcatagtggacagaccgttttacaatcctacaagcaatgcatgaaaatttccattggtctgtattcttgccaatttatggcacgttttcatttttagccattctaaaagccattctatagtagtatctcattgtggtttgatttacattttcctgataattaaagatgttgagcatcttttcatcaccttattttccatttgtttttcatagaaccatatggatgaatctcagatacatcacattaaatgaaagcactccgactcaaaaggagatatacatacacgtacaaaacacacacacacacacacacacacacaaggactccacttatacaatattatggaaaaggcagaactatagagacggaaacagactggtgattgccaagggctgggagtgggaaaagggactaaaaagggataggaaagaagttagggaagtgaggggcctgttcttcatcttgattgtggtgttgattgcatgattagatacaactgtcaaaactcagaactctacactaaaaagtgtgactattactgaatgtaaattatacctcaataaatataactttaaaaatatttcagttatgtccacacaaaaagcctgcacagatatttataacagctttcctcataattgccaaaaggaagcatccaacagtccttcagtaggtgaataaataaacatccagacgatggaacataatttggctctaaaaagaaatgcattatcaagccatgaaaagacatggaggaaactgaaatccacattactaagtgaaagaagtcaatttgaaaaggctacacactgtataatttcaactatatgatataaaagatcaaaggtaaaactatggagacagaaaaaatgttgccaggattagaggagatgaagggatgacaggcagaacacagaggatttttagggcagtgaaactactctgtgtataacagtggaaacatgccatgatccacttgctccaacaagcagaaagtacaagacacattctatggtgttacaccaaggatgaaccctaatataacctatagacttggggtggtaatgagtgtcagtggaggttcaccaattgtaacaaatatactactctgagaggaatgctgataatgtgggaggctatgcatatgtggattaggggatatatgggaaacctctgtaatttctacccaattttgctttgaacctaaaactactctaaaaaataaagccttccgtatatacgggtatatgcatatacatatacgtaagtattataatattgttacaataaatatataagagaaataatcaaaagtcatttacaataaattgtttcccttcatgaggcttgggcatacagaggatagtcagatgcttatgttgactgatgactaatattaacaggatgctgtcattgggccctgctggcttggatcccatccatcatgtgacccaaaaaaagtcacttcattctcccataatcccattttacaagtgagaaaattgaggcccagaggaggtttctgggcaggctgagggtccctaagtggatcagtgttggcaccagaatttgaaccaacatagacagctttcactgttctgctcacaccatactcatgtagtagacaggaagcccagcttgtggtctcctgagatctccagatcatccctggcccaccctgggtccatcattccattgtgccttggggggaactcagaggaaaaggtctatgaggctgggacctcatcctcatcaccatcttccagggatcatgaccatgcaaacatggagatgcaatcttgggggaagtacagtagccaagggtgactaaggaaccgcatgaagcaatgtgggaaattgggaatcagcagacattgggttaacgggacaatggggagccaagagataccatcaaaatttaatggaggggtcagacactgtgttagtgattaatgggcatcaacagacattgggctagtttttgttttttttttttttaactggggtcctagaaagaaggggacagaagaggctccaaaatacagttgggaaatgtggacattatggttcattgtaagtcaccgccattgcctgaggggaaggaagaaagttaacagcatccaccgtattgagggcattcccacatgctgtgttagggacagttagatactgctaggtgagtaacgggagataattgttcatcatcgtgagggaaaaatcaataaggaggatcacaagacatcctgctagaggtgtaataaaagtatcaggagatagaaaccattgtattgcagggggcacaccactgtcccctattctgagggttgtaataagtggtcatcacacagaatggagagtggaccttactagacattgtcacaagtgggaagaggtaacagacaccatgctggagtgaggtgattgtaaaagaggtaatgaggagatctccagaaactgtttccggaattgatgaagtgtgacacacataagagtaaggtaaaacaggaaaaatggccaggcgtcatggccctttccagccctaaacatatggttgtgttggttttcatataagttattaatctgttacatgaaagttacatccttaaggaagccagatactaagcttcaagtcagtgatgagtacgaaaaaaaaaaaaaggcaactgagttggaagaactatgacagcagaagggagatttaagttgtcccagatgaccataaaattcttacctcggaagctttcttgaaggtgatgggagttcacaagacacggtgctgggggtcaaaacacaaagtgctgagggcccgtgaggctgagagacagtcatggtagataatgaggggggtgcaagtcttggtagatgacagtggggactcaacatacattctgaggtttacgtctgtatacataaaggttttttctttttttttttgtagcatctctttcttgatagaaatactgaatgagggttggatatgaccaactgtggtagattcgaatgagaaagaaaaacacccaggagtctgttacacaatgtgttccacaacgaacaactcacataacttaggattcatcactatcaaaataactacgtattatgttgttttatcattcaatttgttggcactatacctaatccacagtaaacaggattatcgttaacttaatacgatctttcttaggaagaatttggtaacagtattctattgtagttttcatgagaaggcttttcctattcaccaaattgactcggttccttgtcagtatgaataatgacccaaggtttactggggatggtgacaatgtaggaagggtccctcgcctcattcagtgccttctcagaggccctctccagaacagccatgtgtgacattctgctgtggtcatttctatttacaataatatacatatttttctgctgcatgcgtgcaacagtgtacaatcagacccaaccctcaggggggttttctcacactgtttctctcaagcgtggctgctctgatggacgctgaacactgatttctgaacgaagcctttcccacagatgccacacttgtagggtttgtctccagtgtgtgttgtctgatgtttattcaaattggacctgtcagtaaaggccttcccacactcagcacacacgtaaggcttctctccagtgtgaattcgctgatgcacttggagctgtgattttttagtgaaagacttcccacagtcactgcactcataaggtttctctccagtatgaattctgtgatgtgtaatcaactctgacttctgtcgaaaggtcttcccacattcagaacaaatgtagggcttttctccggtatgagttttctggtgcttactgagatttgacctgccactaaaggccttcccgcactcggcacacacatagggtttctctcctgtgtgaactggctgatgcaccaggagctgagacttggaggtaaaggacttcccacagtcactgcattcataaggcttctctccagtatgaattctttgatgagtaataaagtttgacttgcggatgaaagctcttccacactcagtgcatacatagggtttctctcctgtatgaattttctgatgaacaatgagtattgatttctggttgaaggctttcccacattcgtggcattcatactgtctctctccagtgtgaattttctgatgtatattgaggtgtgacttctgagtgaaggcttttccacaagtattgcattcataaggcttctccccagtatggattctctgatgtgtaatcaagtctgacctctgggtgaaggcctttccacatttggaacatatataagatttctctcctgtatgagttttctgatgtgtaatgagatttgaccggttggtgaatgccttcccacatttattgcacatatagggcttttctcctgtgtgaattcgtttatgaacatggagttgcgacttggaggtaaacaatttcccacagtgaccacatttatgaggtttctctccagtatgaattatttgatgtgcaatcaagtgtgccttctgaatgaaggccagtccacatttcatgcatatatacgatttttctcctgtatgaattctctgatgcactgtgagtgctgacttctgagtgaaggctttcccacagtcactgcattcataaggtttctctccagtgtgaattctctgatgaataatcaactctgacctgtaggtaaaggccttcccacactcagtacatatggaagatttctctctactttgaactttcttatgtgtaacgaggttggaattattgctgaagaccttcccatattcggtacatatatagggcttcactcttgtgtgaacacgttgatgtacctgaagttgtgacttggaaatgaaggatttgccacagttactgcactcatatggtttttctccagtatgaattcttcggtgtgcaatcaaatgggtcttctggatgaaggcctgtccgcattcaatacagatgtaggatctctcgcctgtatggattttctgatgcatcttgagtgtggacttttgtgtgaatgctttgccacagtcagtgcattcatggtgtctctctccagtatgaattttctcatgtatactgagatctgagttataagagaagcctttcccacactggctgcattcatagagtttctctccggtatgaattctctgatgcctgaagagggacgacacttgaaaaaaggattttccacattcattgcatttaaagggtttctctctcatatgggttttctggtgtataataaattctggcttctgtacaaaagccttcccacattcaatgcatacatagagcttttctcctgcaagaactttcaggtgtactttgagctgtgacttctgggtgaatatcttttcaaatttggcgcattcataagctttctccccaggatacattttttgaggttgagaggatacttgtttataactgaggatttttctacattgattatggtcccataatttctctcctgttggaatacactcatggttactataggaagacattttatcatttggtaatctttttaacattctttgaaggattatttttattatgactgtataaatctaaattatgctttaaaccatttccaaatgaggcatattgatggggtcttttgggaggagaaatgatgtttgggttcacatgaattatttttctactatccttatagtcatattgcctctttgttgtcaatattttcttgatgaaagcaacatcattttgatatttattttctctgctgatagctctctatttgtcaccaatctgtcacaattattctagaataaaatagaatctcacatcactttcatcatgaccttttctttcaatttggaaagaaacctcttcagagattccgtgctataaggtctggaatctaaactccgctcaaatgagaaacaggtgattttagttcaaagaacagctagcagaggctagggggtatggtacaaatgactcatccaggctgaacacagagaaaagggtgagggtgagtaacgtgaagaggaaggcagtaacaatgttgataggaaatgttctggaaaacaattcagcagttagaggaaataaactaaatgaacagataacaccatggacagatgtggaaaaagtaaggcaaaaaacactatatataccacagcatcattcatataaactaatgatccaaactcttaattcacttacaacatgcatgaaataaaaaatgtttccatcatataaaacagtagcttatgacaggcagaaaaatgggtgtgggggaaagagaaaaaggaataaatcaaaacataaataagagagaatcctgacccagactcatgatgatagtgtgtcttaaactgaagactatgattaaactcaaacctcatcaggtaaactataaaaataaagcaatcaaaaacaacaacaaaaacgaaccctggtcaatgtggaatcactcaagcaacatcaagaaaaaaggtcaggaagggtgattaattatgttaaagacagcagaaagataatcccaaagattaagtaacagtgacccccaaagtcatcagtttatccaggcatgaaggactgggaagaagtaagaaatttcatggccactcctctgcagaaaacaaaaagagagggtgattggacagaaagctctgaggcatctcacagtaaaaaaaaaaaaagaaagaaaaaaaagaaaaaagaaaagaaataaaagtgactagcaggagtgggagtgggtgacacagagtaactttgaaagaaagcagatccgtgaatgcgtgaaggttaaagaaagactctaggactatggggaatgtaggggaaaagaagaatgttagagaaaatgagcataaccaagaaagaaagatctttttttttttttttttttttgagacggagtctcgctctgtcgcccaggctggagtgcagtggcgcgatctcggctcactgcaagctctgcctcccgggttcatgccattctcctgcctcagcctcccgagtagctgggactacaggcatccaccacggcgcccggctaattttttgtatttttaggagagacggggtttcaccgtggtcccgatctcctgacctcatgatctgcccgcctcggcctcccaaagtgctgggattacaggtgtgagccaccgcgcccggccaagaaagatctttaatgagggagactggcacatgattcagaatccacgaagccaaagaagaacacagaagtgacaaaggtcggccaggcgcagtagctcatgcctgtaatcccagcactttgggaggcctagacgggtggatcacttgaggtcaggtgttagagaccagcctggccaacatggtgaaaccctgcctctactaaaagtacaaagattagctgggcatggtggctggcaaacacctgtaatcccagttacttggatggctgaggcacgagaattgcttgaacccaggaggcgggggttgtagtgagctgggatcatgccactgcactccagcctgggcaacacagccccggctgcgacccaggctgtgacaaaaaataaatgacaaaggtcatccagggagaatgcatttagtgatctgagaggccaagggggcatcaagcaatacaaaaacattcagaactttccagaaaaagcatcttaatagtattccaagggtgttggtgtttctcaagacagctgagatttcctcccatctcccatctaccggattcacactcgcttcactcacctgggcagctctgacgtggcctctcaccctgcagtgcccatggttcctttccttgctccaacatgaccacctctgcttcaggaacttgatatcctgttcatgggaaatgataaaggtctgggtccagctaattgtgtttcagggcccaaccaataatctcttattctttgatgaggattttttcttcagaaaagtaaccataacttttcagggtaaaattctgagtgccctaaacaaataaagaatcctagacaaatcaagaacaaaatcatcacctatttaagatgcggacagcattcaccaactgagaatgaaaacactctcagtgaggcctcctttcagataccaaggtgactgtgcttacctactgagagcaggtggctgtaggtctccagcatcacatcccggtacaggtttctctgagaagggtccaggtgccgccattcctctctgctgaaatcgatagccacatccctgaaggacactgatccctgtaagggcaaattcttgttcaatgtgcacagtcagcttagagggttggagagactatatttaggaatatggaatacaggtcttgttgttttaaatttacattctctttttaaaaactcactcccatttctctaatactttattatgaaaattttcaaacataccgacaatttaaaataattatgcagtaagaaatgtatacctaccacctaggatcaatcattaacactttacttgctttatcatacatctaagccattcttttatctatccatcttgcttctttgtacatttcaaagtaagttgcagatgacaccacacttcttcctaatacttcattttttttttcttccgaaacagagtctcgctctgttgtccaggctggagtacaatggtatgatcttggctcactgcaacctccgcctcccaggttcaagagagtctcctacctcagcctcccgagtagctgggattataggaatgcaccaccatgcccggctaatttttgtatttatagtagacacggggttttgccatgttggccaggctggtcttgaactgctgacctcaggtgatccacccgctttggcctcccaaagtgctgggattatgcgtgagccaccgcgcctggcctctcttaatacttcaaaatgcaaatcatgaactagggtgtaaaacgtatcaaccttttgtaagtaacatttacatacaattaaatgcaccaatctttaatttaccatttaaagttttgacaactgtgtacacctgtataatccagaaatttcgaagaaacattttatatatatgcatattaaatatttagttttacatattttgtggaacacagaaatcccatcaagaatttctgctatttgttctgtactatagtcagccaattactcatttttcaaaactggcaattgaaataagctgtgttttagtttcctagcaactggatgaatgacctgcgatatgctttctgatcaatttaggacgagcccttatgctagccctgggaacacagaaataattatgtgtccaatcttctagcaacttaaaagacttggaaaataaatcagactgaagttttttaaaaaagaagacataacaaattcattaaggtgttgaaaagtagatgccttatggtggaacacactgagggcccaaaggaacaaaaagtacattttacttgagggagtaagttgacattccgtagagttgaggaatttaacttggaagatacaaagtgtaacccagaatatggggtgagggggacaatgcccagaaaagacaagaataaaaggtgtagagatagaaaaatacaccatgagtttagggaacagcaaacaggtttatataaatggagagaagtctgtctgatgtgtcagaaaagcagtataggaaaaacagtttggtcaaagtatggaatttttactttcagtaatggtaattaaggtaatcagatttatatgtaaattttttttaagttctgtattacacaggataaccaaacagctggtgaggaaaagttcttttttttttttttttttagacaaaagtctcactctgtcgcccaggctagagtgcagtggtgcgatctcggctcaccgcaacctccacctcccggattcaagccgttctctgcctcagactcccgagtagctgggattacaggcgcacgccaccacaccaggctaattttcgtatttttaatagagacagggtttcaccatgctggccaggatggtctcgatctcctgacctcacgatctacctgcctcggcctcccaaagtggtgggattactggcatgagctactttacctggttggaaaagttttttatagaatgattctagctaataaataaagaagttaggataaaattaaaataccaccatgtataactactaatgaaataacagatttagacaataatcattaatggctgttggaatgtttcagttgaaaggctgaagggaagcgtacaatggatagatcagctagtaacatcagcatccacaaaccagctctcatgtgcctgctgacatggcatagtaattaatttcattacactacttatgaagtattcttgccaaaaaataaaattcaaacccctatctcatcaagtctccagatctaacaagccattcacaggagtgggaaggagagtgaaacgtactgaacaatatgaagaccaagacatcagctaaattcagaaggtagcaaatggcccacttcttcaaaaaattacaagagaatggacatggaagggaatattttctttattaatagagactttagagccatactaaccaaaggcaacttgtggactttcactaattaaaatgaaccaatcttaaaaaaatatttatgacaatttagagaaatgcaaatggtgggtattagatgatatcaaggaattactgttattttgttgtgtgacattagcttactggttatgctaaacacaaaggaaaaagggaattcatatctctccgagatacatatcaaggtatttttacacaaaacatggtgtttgagatttgctttaaaataatctagctgctgaatgggaggtggtttcagataaagtaagaatggcagaatgggccaggtgtggtggctcacacctgtaatcccagcactttgggaggccgaggcaagtggattgcttgaggttgggggtttgagaccagcctggccaacatggagaaatctcatctctaccaaaaaatacaaaaattagctgggtgtggtggcacacacctataatcccagctacccaggaggctgaggcacgagaatcacttgaacccaggaggtggagattacagtgagctgaggtcgtgccactgcactccagccgaggcaacagagtgagactccatctcaaaaaaaaaaaaaaaaaaaaggcagaatgttgatgacgactgaaactgggtgacagggacaatcggtgaaagggatctttatactattatctttacttttgcatatatttaaattttttcataataaaatgctttttgaaaacaaaatacatgatcctccaaattaaaaaatctaacttggaattgcacaatgaaaggaatgcctattaccacatggagctgtatacatttaaagaaagtatgctagggacttgaatacccctccctcaccttagcaatttatcaaaatactagacaggacatcatcaaggttatagaaaaggcagctgcaacaaacaacagcagaatgcacattcttttcaagcacccatagaaaagtgagcatgacaaccataccctaggctgtgaaacaaacctcaacaagtttacaagaattacaacaatacaaagtatgttccacaagggaatcaaacaaaaattaataacagaaacaaaacagacaaaatctccaagcaaattaaaaaataacaaacaaaaacaacctaaaaaacccacaaaatatttgaaaattaacagcactcttctttaatgacccacaggtcaaacaagatatcgccaaaataatatttaaaatacacagagttctatgtatagacagtaaaaatacaacctatcaaaatctgtgggatgcaggtaaagcaaggctgagagggaaatttatagtactaaaggattacattagaaaagggaaaaagctacaaatcaataatgtaagcttgtacctcaaaaaactagaaaaagaggccagacatggtggctcactcctataatcccaacactttgggaggccaaagtgggaggattgcttgagcccaggagttcgagatcagcctgggaaacagggcaaaaccccatctccatcaataatacaaaaattagccaggtgtggtagtgtgcacttcccaaatagtggtcccagctatttgggaggctgaggcaggagaatcacttgagcctgggaaggcagaggatgtagtgagctgagatggcaccactgcactccagcctgggcaacagagccagaacctgtctcaaaaataaataaataaataaataaataaataaataaataaataaataactagaaaaagaagagcaaaagaactcaaaagcaagcagaaggaactaaataataaaaagtagaaatcaacaaaactgaaaacaaaagatagagagaaaaatcactgtaacacaatccagttattagagaacaaaataataaaaccgataaattcactgattggtctattagtcaaccagactggcaaagataaaaagacaccaatattaggaataaaacagtaaatatcattatagatgcagcagccatttaaaatacaatgagaaaaataaacactccaagctaataaattcaataacttagaaaaaaataagccaattcctcaaacatcacaaactaccaaaactcaaacctttgaaaatggataagataaaccatcttatgaccattaaattaatttaaattaataatttaaaagctcccgaaaaagaaacctctaggctagatagttctaccagagaattctttttttcttcttctttttaattttttttgtgagacacgatcttgctctgtcgtccaggctgaagagcagtggcgtgatcatcggtcactgcagcctcgaactcctgggctcaagcgatcctcctgcctcagcctcctgagtagctgccactacagacacatatcaccatacccagcttttaccaaagaattctatcgaacttacaaagaagaatgtgtcatttttacataatctcttccagaaaataaaagaggagaaacacttccaaactaatatttttaagcccagtattactccaatgtcaaaatcagacaaacacagtaacaaaaaaaaaaactacaggccaatatctctcatgaatttaaatgcaaacattcccaacaaaatgtcagcaaactgaattcaagaatcactaaaaagaatcacgtaccacaataaactggaatttatgggggaactctttgtactatattttctaactccttatgaatctgtaataatttcaaaataaaaaactgaaatatacatattacttaagaaagattattttcaaaacatacataacatttgggaatggacaagactggaagatcagagactcattgcacaattgatgagagagaatataaattgtagttgagcctgaacaacacaggtttgaactacgcaagtccacagatacatgaatttttttcaataaaagttacatatagtgtgcatgcctctcctgcctccccttccaccttctcctcctcttccgcctctgccacccgagccagcaaaaccaaactctccttttcctcctactcctcagtcagctcagatgtgaagatgacaaagataaaaacctttacgatgatccactttcacttaatgaatattgaatacaaatatcttccttttgattttcttaataacatttttttctctagcttactttattctaagaaaaaaaaagtcatgtatgagcaggtctctgaattcaggagagtgcacgagcacacaggaagaaattggagacagaaatgtattaaagatacttgtgatcattaatatctgaaagtatgattcttttttttgttttttgagatggagtttcactctgttacccaggctgcagtgcagtggcgcaatctcggctcactgcaacccctgcctcccaggttcaagcgattctcctgcctcagcttcccaagtagctgggactacaggcaccggccaacatgcctggctagtttttctatttttagttgagatggggtttcaccatgttggcaaggctggtcttgaactcctgacctcgggtcatctgcccatctgggcctcccaaagtgatgggattacaggcgtgagccaccacgcccggcctaaaagtatgattcttaaaagctacttttttaatttattcatttaattgtgttcggagattacaatttgtttctttgtgatgtgtgttgattctgtttatgaggcttacaatatcttcatttcttaaaaggaaggcttatacactgttggtgggagtgtaaattagttcaggccttatggaagacagtgtggcgattcctcaaagacctaaagacagaaataccatttgacccagcaatcctgttactggatatatacccaaaggaatataaatcattgtattataaagacacatacccacatatgttctctgcagcagtattcacaatagcaaagacatggaatcaatctaaatgcccatcagtgataaactggataaagaaaatgtggtgtctatatatacaccatggaatactatgcagccataaaagagactgagatcatgtcttttgcaggaacatggatggagctggaggtgataatccttagcaaactaatgcaggaacggaaaccaaataccacacgttctaacttataagtgggagctaaatgatgagaacacagggacacaaagaagggaacaacacacactggggccttttggaaagtggagggtgaaaggagggaaaggatcagaaaaaataactaatgggtactaggcttaatacctgggtgataaaagtctatacaataaacccccatgacacaagttaacctatataacaaacctgcccttgtacctataaacttaaaccaaaaaaaaagttccctatatacctgaaatgaagacgcatgctctagttttctcttcatcacacacttgcatattcatgccctacacacactgaacccccagcccccaaaactaatgtcatcaaaaaatttaatggggaatcaagacaatgtcatgttaggctagaatggagttttgacacctcaccaaatgatcttatacaaacagtttgtcaggaagaaatctcctcattcaaagacaataaacatctcctgatgtacaaagatgctatgagtaaaaggatgaaaaaaaaaagagaggagattaagaagaatacactagaaataaattgacatacaacagaagaaatcataacctccatgaattcaaggaatttactaaaacaattaactgcttagggaaaaacagattaagaatatagtgatataaatttctgaaaaataaattaacagaactcagtaaaaaagtaaaaaaaaaaaaagcaacacaaaaataaaagtctccctgaaaaaaatgagaagaccctgcaaaaacacaaaaggtggcaaagagcagattaaggcaagtgagcaacatgagacggaaataaagatattttttaaagaaaataagaggagtttaataaaaacatccaatgaacaaaagaatccttgaattggcagtgtagaactgttatcattattcacagtacaaatttaataaatactgtcttaaagagtagattcgaatatttagttcaagaagttaacatcataaagatgacacacacacacacacacacacaaaaacaaaaaagaatccaaacattccaaattacatggaagacacacagaaacaaagcacaaatatagagtatatagtgaaagatttataaaatagccacatcagaagcataacataaaatgcatctttccacacacacacacaaaaaagcacaagaactccaaaggatgacattaaaaagatgaccaaaggcatatctggagttgccaacagaaaagaaataagagcctcctccttaatattagatagggctgaattgcaggggaaaaaatattaaacaaggacacaatgtgaaatgagtttcggatgccgtatttactatctgtgcaccaaactacataacatcaaaatttataaacaaaaactataggaaaaaggccgggcgtggtggctcatgcctataatcccagcactttgggaggccgaagcgggtggatcacgaggtcgggagatcgagaccatcctggctagtctctaccaaaaatacaaaaaattagcagggcgtggtggcgggcgcctgtagtcccagctactcgggaggctgaggcaggagaatggcgtggacccgggaggcggagcttgcagtgagccgagattgcaccactgcactccagccggggcgacacagcaagacactgtctcaaattaaaaaaaaaagaactataggaaaatatagatagaaatacatttgtggtgggaaactttaataatatctctcagcaacttgagacaaagtagaaaaaaatgagtaatactatagaaacctcatagctatatatcttattgataagctatcaaatttttttcttttcaagtgcctatacaacaatcccaaaacaaaacaaaaaacaaagaaatacccgtaataatctctcgaaaagtaaatttctccaatgctgcaatcctaatcttattgaagttttttgcttttgttttcaagacagggtgtcactgtcacctaggctggatgtagtggcaatgtcgtggctcactgcagccttgacaggctcaagccgtcctccaatctcagcctcccaagtagctggtatcacaggtgccccaccaccacactcagttaattttggtttttgttgtagagacagggtctcactatgttgtgcaggctggtctcaaactcatgggctcaagcaatcctcccgcctcagtctcccaaagtgctggaattacaagtgtgagccaccacatatggccaaaagtaaagttaaaaaatgaaaatcttaaaacctagaaataaaatgtggtaaatggtatttaaagatttggtggggtagttaatgttctagaaattcatccttttcagctgggtgcggtggctcatgcctgtaatcccaacactttgggaggctgaggcgggtggatcacgaggtcaaagttgagaccatcctggccaacatggtgaaaccccgtgtctactaaaaaaatacaaaataattagctgggcgtggtggcgcacgcctgtactcccagctactcgctgggctgaggcaggagaattgcttgaacccgggaggcggaggttgcagagccaagatcacatcactacactctagcctgactacagagcaagactatgtctcaaaaaaaaaaaaaaagaaattcatccttttcatttagatttttttattcatttgcatgagataaattatttttctaaattatttttagtacagttttgctatataccagagcttctgatatatatataccatttttattgtttttgagatattttacaattttagttttgactttggctttggagtgggttgctgagaacatagcagttgtttcactaatcccagtaaaaacctactaggctattgttttcttctactcttcaatgcagttagttaacatatttgacttctgaatctatcttcataatttccagttctttcaggcatcaaggttaacactgtaaacaaaataaaacaaaaaccaaaagcaaggttgagaataattttaaatattattctttacccaaaacttcagcataatgaccaactataaaaatgcatgacctttccattattttttactgtgttggaaatgctgaatcaacattttaatttcttcaaggactttgaaccatttaaattcttaccaattatatctattttttgtaaacttttatccttttatttatactttcatatttttggcatgattttgtataatattcattcatgattgtttgaatcttaggtacggaactaactgtttctcctgttttgttacattcttttgtctttttttcagtcttgctccgtcgcccaggctggaatgcagtggtatgatcttggctcactgcaacctccgcctcccaggttcaagccattctcctgcctcagcctcccaagtacctgggattacagacctgcactgtggcaccctgccaatttttgtatttttagtagagatggggtttcgccatgttgactagactggtcttgaactcttggcctcaagtgaaccacccacctcagcctcccaaagtgctgggattacaggtgtgagccaccatgctgcccagtctttttttttttttttgagacagagtctcgctctcgctctgtcccccaggctggagtgcagtggcacaatctcggctcactacaacctctgcctcctgggttcaagcaattctcctgcctcagcctcctgagtaactgggactacaggtgcgcaccaccacatccggctaatttttgtagtagaaacagagttccaccacgttggccaggatggtcttggtctcctgacctcgtgatccacccatcttggcctcccaaagtgctgggattacaggtgtgagtcaccatgcccggctgcacagtctttgattatgtagatatttactccattttttgattgtcaacacatcaacttgtcaacacattttttgattgtcaacacatcaacacagcaacttgtgtttctgtcaaactcataccttaggtcttttttttttttaaacgtccaggattccaaaaagaagcaattaaatctatagtttttcccctctacccacaggatagctttagcacataaacttactttatttatttatgagacagggtctcactgtgtcacgcagactggagtacagtggcatgatcttagctcactgcaacctctacttcccaggctcaagcgatcctcccacctcagcctcctaagtagctgggactacaggcctgcaccaccacacctggctaatttttctattttttgtagagacggggtttcaccatgctgcccaggctggtcttgaactcctaagctcaagcaatccacccacttcagcctcccaaagtgctgggattacaggcatgagccactacacccagcctaccacacaaactttaaaatgcactactttatccaaatgttttgttttgttttgtttttgacatggagtctcactctgtcgcctgggctgaagtgcagtggcacaatcttggctcactgcaacctctgcctcccaggttcaagcaattatcctgcctcagcctcctgagtagctgggattacaggtgcccgccacatacccagctaattttttgtgtttttagtagagacggagtttcaccatgttggccaggctggtctcgaactcctgacctcatgattcgcccacattggcctcccaaagtggtgggattacaggcactgggcctggccccaaatgctttttaattgtggtaaaaatacacataacataaaagttgccattttaatatttttaagtgaccagtttagtgacatgaagtacattcacgttgtgtaagagccttttactttttatttttattttattttattttattttattttattttattttattttatttttgagatggagtctcgccctgtcgcccagcctggagtacaatggcacgatctcggctcactacaacctccgccttccaggttcaagtgattctcagcctcagcttcccaagtagctgggattactggtgcgtggcaccacgcacggcttattttttgtgtcttcagtatgagtcttcagtatatgagtttcaccatgttagccaggctggtctccaactcctgaccttgtgatccacccgccttggcttcccaaagtgctggggttacaggcgtgagccaccgccccagaccttactttttatttctaatttaatgctcttagaaaacagaatcagtatgatggcaaaggtttctattctttgtctgccttgagagtagtgtactaaaatggccaatggcatatttaatgatttctgttcatttttacttaatatagttcaaaaatacattattagttaaacaaatgttgataacttttataattatttgtatattcttccttttataagtatgaaccatcctcttcatccctttaagtgattttcaccttaaattccttttgacctgttcctaaattgcatccctagctttcttttggttcattcctttatttttaaatgaggataaaagcagcccctgaccgctgagagttagcctggtactatcagttaaacctcagttttgctagaagctagcctggcaggggccagctaactcatggtgttctccatggcgctacacaaaaataatctcttggaacaccaacagcaaacaagaccaatctctgaccaccatggtggaagacaaaaccaagaccactctgtcattatacttgagcacagacaaaaatcacaatcttcttcaaaccataaaaatctccttactctgcataaggaaagtgactgccaattatacctttaccaattatagcttttgcttcaatctacccttcatattttctaggtaaaaatgattaagatacccaatcataaaatttcccaataggaacagaagtagaggttcagtgaaattcagctagaagattcttattacctgtgactaaaaccagaaatgaaattctactacaacttacacatgcaacagaaaggaaagacatgagaagaatgcctactgctacatagttcataatatgagctgtattttaccaaacaaatatttaaaaagcaatgtgtgaaaatttagtctactatggcaccttttgtgaaatagaaagaaaaaaatgtgtacttgtttttacttgtttatagaactaagcaatcaaagaaaaagaataaaatcggtcctgtatgttgagaaacatgggggtaggtggggaacggaggtgggtgaatcacagatccatgtttcccctgaatttgtttcctataacacttttcagggtgtgttgcctttaaatgcatttctaattgtttttaatttttattttttactattattcccattttaccaatattatttttgaacgaagtgtatatattccctattcagaaaactaaactttcctaatacactatcacaatatctccagaggcataagaaataaaattatacccatgaaataagaacaagatgctaatcaaaaagaatatttagaaaataaattacagttattaaaaattaaaacgttgaattaaaatgttgatagtggtaacgagaaactcaaaagaagggctggaaggcaaatgtgacaaagcttcctgaaaaagagagcagcaaagaaatagaaaacagtagagggaaaaaaatggagaaccaatatccgaaaaacagaaatgtaaaaaaaaaaaaaaaagaaagaaagaaaatatttgtgtttgaggaggcagtttaggaagaaacaagagaaatactttgaaaatcccacagaaaagtgacttctaaccaggaaaatctatccacagcccaaagatcaatgtagtgtgatgacaaaataaacaacagtttttcttaatagtccacctctccactgtcgcacagatggcctccagagacgaagacattacccacatgttgctcattctcaacaggaagatcaagatttgtttcaggagcagcaggtctagagtccagctgcttcctgtggcccagctccctccctcagtcatgaggttctagtgacagaccagagatacctagtcctggattgaattcccacccccctgggactcctccttctcacctcataggagctgccatgatcctctggagccagggctgaggatttctgaggtgaggtccaattagctggcatggccacactgggtctcaaccctttttctgtagggtgtctgaagcttggcagtcatctgtgaactcaagcagagctgctctgaagagatgggctggagtctagaggaaaatctggcccaggggctccccagagacacccagaaacctggaaagacaatgttcccatagtcagtcatttcacattcaacacataagcacttcctggatatatcaaggtgcaggtccctgagctagaaaccaaagcagtggttctcaaatgggtatgcattcaagttacctggaggacctgttaaatgaaacacagttaaaaattctcagcctactccacagtttctgattcagtaggtctaaagtagaacccaaaaagtttcgtttctaactggtgcccaggaaacgctgatgctgtcagtacagggaccacactttgagaaccagcgctgaggagaacataaaatttaacaaaatctgtgataggtattagttacggtgaaatatgggaaaagtcatgagagatggagtaatgttactgcagatttgaactgcagctctgacacttttcacctatgagaacagaagtttcttcactttcttttgagacggagtctcgctctgtcgccaggctggagtgcagtggtgcgatctcggctcactgcaagctctgcctcccaggttcaagcaattctcctgcctcagcctcccaagtagctgggattacaggcatgcgccaccatgtccagctaatttttggtaaagacgaggtttcaccatgttggccaggatggtctggatctcctgacctcctgatccgctcgcctctgcctcccaaagtgctgggattacaggcgtgagccactgcgcccagccatttcttcacttttaatttcagaaatgaggatgaaaatgcttatctcaaagttacaaaaattaaatgagataatacttgtaaagtactcaacacctcccaggcacacaaaaatcatacaatacatatcagcgattaccatgcattatcagatattaaaacaatataaaaacaatgtaataaaaacaagtaaaacaataaatataccagacaatattgatctatatatgtgataaaagtggtattcaaatgagtgtgcataagacattcattgcataaatggcagtgatataatgcagtgatataactggctggccacctggaaaaaaacaaactagatctccatcacacactattcagtaggcaaatgccagcaggactgatcacttaattatgtgtatttgttaaatcacaaagactattaaaataaattttagaagtatacatgtgtataacactgtggtgggctgggagggatcttattacacgtgagaggaaacacagactctgtaacagaaaaatcagatacttttgattagatgatatttcctaactttatgttaaaatataccacaaaaaaaagtaggacaaaagatatgaaaattcacagaaaaggaaacaaatggcaattaaccaaataagatgccaactttagtaactggaaaatgcattggagcaattagatataattttccctcaaaattttaaaaacttttaaaatgcaacaatatccactgctggaaaagcatctgggaaaatgagttattttataaattgttggtataagcttgaattgttatattttgagctacttagtcatatctataaagtattaaaaatgcacatatgccgggcgcagtggctcacgcctgtaatcccagcactctgggaggcggaggcaggtagatcacctgaggtcaggagtttgagaccagcctggccaacatggtgaatccccgtctctactaaaaaatacaaaaaattagctgggcgtggtggcgggtgcctctaatcccagctactctggaggctgaggcaggagaatccgttgaacccactaggcagaggttgcagtgagctgagatcgcgccactgcactccaacttgggtgacagagcgagactccatctcaaaaaaaaaaaaagtgcacatagttattcctaataatttcacatatataaagcagaaaaagaaggacaaatggacaaataacctttccagagttgagtactttaccttcctctgtaattaagcagacaaaataatctgtgaggagacagatatattttttgaatatatgcttaattaatatctataacaatacaattagagaacatagtacactgtttctatgtaatagatgtgacattcatgaaaactgaccacgaactaggtcataaagcaatttttcaatttgaccattaaacagacattactttaaaaaggaacttctaaataactcatggatcaaagaaaaaaccacttagatttgaacaatttttaatacaaagattcaccaaaacttgagaatttttatattaaagaagactgaaaattaaaaagctgaactttcaactcaggttagaaagcaagctgattacagtcctcaccgatcaccataactgaccctacaggctctgtcactgaccacagactcccatcactgacccccaaacctcaatcactcatcccaaagagctccatcaatgacctgagaaatccgtcacaatcaacaacggacgccacagaaccccatcaccgaagcctgaaaccgcaatcactaactccacaggcaacctcgacaccccctattactggctccacagaaaccccaatcgtgatcaaccaaaatcacctcaaagatttatcggtattggaatatgaaaatactcctgacaccagcggcaaaaaagccttggaagaccacttccacttccggtccgacttctagcacctcccctttgtaggctgttgatatggcgcatgctctgaataaacttggaagccagtttcctcgaacagtcaacagggcgcagacacagcgcacaggttccgtaatgtggcgctgtccggcagagaacatggccgcgcccttatggtgtttattcgcgtgggccgccattttgaaagcatatccattccgtagagcagaggaattggccgctggcagggtttcctagagcgaggcaggtatagttacataggatgctggagtgtgacccttgtctgactaggcttctatttcggaggagaaagttactggaaatgtgggtctggtgctgtatgttatatttagaaaagctaagttacctttctgaatacaggacactgaggataataattaccagggaatagaggagccagggaaaaatcaccaagtgaaggggatcctgggagaaaccacaggcagatgataggaggaatcaggatagtacagtccattttttacagacgccattcagggaaaaggtggaaaggtcactaggggagtcatctcttgagtgaaaccaccctgaaagtctgagagacatctgaatgagtagtaggctgcaggaagagtggtacaacttttaatgggagaaaccgccttgggaaatagggtagaagtccaatagtattaatacaatcctctcctgggagataccaccagaggagggaggagaagtccgggcgtccccttctgaagggctgggtcgggtgggaaggtgaatagagatttgaatcacccattaccctccacactaaatacctcaagtgcaactatagtaggcagcaataataacaacactaatagtctttagtatggccaacgtgttactaaaagcacctaaagaagactgtttttatttaccttgaagttaaaatataattaataacaatcgccttaccatgtcaatgaagctttaagtgcagtctctgacccttagcttctcctctgtggaaattctgaaacctccttactcccctttttggagggtgtggatgaggagttgtaaagatacaattcctttcacttggtgaactcctaaacatgattcacagctcagcttctgacaggaagttctacctgaacagtggtgggaaattactacccaatgtgttcagttccagcaggtgggaaacttgttttcagggaattgaacctacactctgatgtgggcatgctggatgccttcaggccagttatgtctgtctctgggactcggcttaaaaatatgtttagagaattagactctgctgatctcaggttttctttcttctccgaaaggacggtctaaggaaacatctgtggaagtccgttagtaaacacacaatttctaccaaggggctaagaattactgttgattttgtcagtaatgcagctctgttaaaaagaagatgacttaacttttagggattcgtgtggaaatatttatgggtggaataatattagctttaaaaactccactgagaaaaaaaaaactccactgagaaggggtatatggtattgcaaaagaaaatgttgataaatgttaaagcagagtgataagtagacagaactcattataatgttctcttccatagtatttgtgtgaaattttcatagtaaatttctaatttaaaaagaaaggaattaaaaacatttacaaggaaacatcaagaagacagcaggtgtggtcatagtgttagggaagatgaaacctaggagacccagagtgacaccattttaagttcagctccatcttgacactagcaaggcacattcattgcaagtcacaactcatggtcctaatgtgtttacagcgaaggaagcagccctgtaatgcctgcaaagacaaactcctagaacaacagaaagtccagatgtccaatacccataacaataaatgctttcaagatcattatagttatactttgatgtacttactaaaatgtcagggatagttttctttaaatcaatagaataataaattttgtcataatgtcaggccacccacgcataggcacagcttactttagtctttacatagacaagacccctatataagaaaagcttaacagatgttcctccacttgctttctgaggacaccctactctgttgtggagtagctttcaataaactatctcttctcactgcactctacaacccacctggaattctttcctgcatgagatcaagaaccctctcttggagtctggattgagacccttttatttccataacaatagtattatacaaacacaggcatacctcagcgatatttagggtttggttctagaccactacaataaagcgagtcacacaatttgtttggtttcctggtgcgacatacactggggcctgttgggggtggggtggcgggagggagagcattaggaaaaatagctaatgcatcctgggcttaacacctaggtgatgggttgacaggtgcagcaaaccaccatggcacacgtttacctatgtaacaaacctgcacatcctgcacacgtaccccagaacttaaaataaaaattaaaggctgggtgcccgtggctcacgcctctaatcccagcacttggggaggccaaggcaggcggatcacgaggtcaagaggtcgagaccatcctggccaacattgtgaaactctgtctctattaaaaatacaaaaattagctgggtgtggcagtgcacacctgtagttccagctactcgggagtgtgaggcaggagaatcacttgaacccgggaggcagaggttgcagtgagttgagatcgcgccactgcactccagcctgggcgacagtgcaagactctgtctcaaaaaaataaaattaaaattaaaaaagtctattttgaaaaaaatagagaaagaaaacaacatgagaaagaaaaaggaacattactactgagagaaagatttaaaactcaagagaattctaaggatattttgagaaatccatttgaaaatgtaataaaataggaagtttcctaggaaaacacagatgaaaattgccatgtataggaagaaaatttggataggccaaaaacaataaaagaaattgaattggtagcatatgcaaaaaccaatcctatgtgtattaatgattcaaatgttaaaaacatagctttaagacttttagtaaaaatattagtaaatgtgttttagactctgtggcaatggaaagatctcttaaacagaacaccaaaaaagtattatatataaaaggttgataaaactgactatattaaaataataatttttgttcatcaagtgatagtaaagagaatgaaaaggcaaggtataaactggtgcagatacacatagaacacaggctacccgagatagcaggaatatgctttttaaaaaaccctccaaatcggctgggcgcgatctcggctcactgcaacctccgcctcccgggttcaagcgagtcttctgcctcagctgggatcacaggcgcctgcctaatttttgtatttttagtagagacggggtttcaccatgttagccaggctggttttgaactcctgacctcaggtgatccacctgccttggcctcccaaagtgctgggattacaggcgtgaaccaccgcacccagctatgcatgcatttttatgcgctgggagtgaaggtgtaggattaaccagccttctcaggaaaagcattatagctatgctataactattatactctgttataactacagcataattatatacaacactataacagagactgtgaatgatcatactagtgatgtcttttgaggggcagcattgcatgggggttggtataatggactctgtagttatctgtcctgggtttgaatctctctgtgctgttgactagctctgtgatcttgggcgagctccttcattcctctgtgactcagattattcatgtggaaaaggtgaatataataattgtagctatctcaagcattatgtaaattgaatgagtttatacatttaacgagtctagaacaggggcctagtatacattaaacacgtccctaaaatttgctgtagtcatcatcatcattatcatcatcatcacaattagcactgttgtgggtgccacatcttttttttttttttttttttttttgagacagagttttgctcttgttgcccaggctggagtgcaatggtgtggtcttggctcaccacaacctccgcctcctgggttcaagtgattctcctgcctcagcctcccgagtagctgggattacgggcatgcaccaccatgcccggctaatgttgtatttttagtagagatggggtttctccatgttggtcaggctggtctcgaactcctgacctcaggtgatctgcctgccttggcctcccaaagtgctgggattacaggcgtgagccactgcgcctggccgggtgctacatcatttcagcctcacatagaccttacaatgtgcagactattcccctctggcttacaagactgtcatcattcctaatagtggtatcaattgcaatgacaatagtaacaaatgcaagtaaccacaatgtccatgtggtagccagcctccaagattgttctcaatcaatcttacctcctcgatattcaaacttctatgtagtctcctttcacaaacaaaagtgaccactgtaaccaatacagccaccatgtggtgaagacactcaagtattcttgtggtgggttccttgtggtgagaaattgaggcctttcaccttctgctcatagtcatgtgagcgagcttggaatcggatcgaattagcttcagtcagccttcagatgactgcatttctgccatgtcaacatcctgattgcaacctcatgagagctcctgagccagaaccacccaactaaccttttagattttcagtcctcggagactatgcaagagaataagtgtttatagtcactttaagtcactaacatttgggtaatttagtgataattttctgtgatattattatggtgttaatttaatatttactataatagtggatattgctattaaaacaaactggagctgggcacagtggctcacacctatactccccgcactttggcaaaccaaggcaagaggatcacttgaggtcagaagtttaagaccagcctgggcaacataatgggactccatctctacaaacaaacaaacaaacaaaaatcagccaggcacggaggcacttgcatgaagtcctagctactcaggaggctgaggcaggaggatcatttgagcccaggagtttgaggtcgcagtgagccatgatggcaccactgcactccagcctgggcaacagagccagaccctgtttcaaaaaaaaaaaaaaaacactcagactgagggatttataaacaagagacatttattgcttatagttgtggtggctgagaggtccaagattaagatgccagaacattcagtgtctggtgacaactccctgcttcatagattgtgccatcttgctatgtcctcatacagtggaaagggcaaacaagctcccttagacgacttttataaggtactgatccaactcatgtgagcaaagtcctcatgacctaattatctgccaaaggccccacctcttaatattatcccactggggattaggctttaatatgaacttcgaagggacacagacatttagaccatagcaatagacaacactgcattataaatgggcccatttttcagagtataatagaacacaccgggttctcaggattggcatttattatagtcacaaactttatataaatgcttgtattaatgtggtgtttacattatcctatttcacagatggaaacagaaaataccagcttttttaaaatagcaatatctattattataataaatattgaaataacaccataataatatcactaaggaagtaatctaattgtgttgattttgcagagggagaaaaacattacctctagagctgaggctattgtgctcatgcaaactccaatctgaaggtggtagaaactagaagggacaggatttcttagcatcagagttcataaattattcatggtatcttaataattaaaggcatgtaacaaatagcgacaaagattgtgatattagttataaattatgataattatacttaaaaccaataatagaatcaacataaggtagaattaagtattgtagtgaataagtggtatgatatggggagtggggagtagagcaggatagggtggggtaggatataacatagataagagtcacatgggcacagtagcctcactgaagctgagggtggagggctcaattcattctgacattagggcaagtgtgcatgacaaccatggctttaacctgactttggtcacggggtcatcttctgccacaccgcatcacgttcattttccaattaagtgcctgagacccagaaccctcagccctgccacattcctcttgttccctaggttccatatttgctggtggctgctccagtgaatggggtggagcatatggcactgatgatggggaacgggattgaaagtactagggtggatgccaatggtaatagacctctgccactgggtcccttacgactgtcctccaccgacatggtatgccactgtgaccaagaggaggctgagttgggagaccttgtggaatgccagggaaggatgtaggtaggatacttgggaggagggtagcagggtggttgggcaccacccgcacatggaattagggctgggatatgctgaagcatggggtggggcattagattttgaattagaggacctggaaccaaccctaccacctcccacgcatttagccaatgtgtgtggggcatttggtcaatgtcaatactattgttattattcatccgttcattcgtttgttcattcattaacacatttaacaagcttgtactgaatgtctgctttgtgctggcaccatgttgggtgccttggacacagcagaaacaagacagaccaagtccaggtctcatgaggtctagtggaaaggttggatgaaaaaccaaaaaaaaagaaatatttaatatcaaatcagatggtgatgcctgcaacacaaatatatacaaaataatacagcagaaagtgaccccaatggatgtgttacttcagatacaaatggtggggtggatgcttttcaaagatgggggaagaaagcaagatgcatgggcactggggaagcagtgtatgcccagagaacacagttggtgcaaaagcccaaagctggagaaagcttccttggtgctaaatcagccagaattgggattcttgacaaacaataaaaatattgaccacctccaactgcaggctgtctgaaccctatgacccgttattatagttataactttatactataaacattaaatgtgattatgtaaaagtagaaataactaaaatgttacatgaaagtttgatatataaaatataaaaattatataatcatacgatactatatattatataaaatggaaactattttgtagtaggtataatatcataatgtgctataacatactgtcaacacaatatacagtgtatgatatgcacacataaaataaaatacataaatctatatttataatctagtatctaataatttttcaaatgtcatttaaactatcacatagtaaaataaaagagtacttctgagattcatccatgttgcagccagtgtcaataaatcacttcttttcatgttggggtagtattctattgtatagatgtttaattagtcacccactgtttaattagtcacccactgttacatttgggttgtttcctaattttggcaattatacagttgctgtgaaatttgagtacccgtgtttttatataaacaatttttcacttatctagggcaaatacctaggagagggattggtgggtcatatgataagtgtatgtttaacagtataagaagctgtcaaggctgggcatggtggctcacgcctgtaatcccagcattttgggaggctgaggcgggcagatcacctgagaccaggagttcgagaccagcctgaccaacatggagagacccttaactaaacctctactaaaaacatataaaattagccaggcgtggtggtgcatgcctgtaatcccagctacttgggcggctgatgcacgagaaacgcttgaacctgggaggtggaggttgtggggagccgagatcatgccattgcacttcagcctgagcaataagagcaaaacttcatctcaaaaaaaaaaaaaaaagctgccaaactttttgcccaaagtgaatgtaacattttacatttctaccaacaatgcatgaaagtttccattgctctgcattgttgccaactctcagcattatgtctttatttttaggcatgctaaaaggtgtgtacaggtatctcattgtggttttcattttcattttcttgaaaattaaagatgtcgagcatcttttcatcaccttattttccatttttatctcatataacaatatggatagatcgcaaatacatcacattaaatgaaacaagtccgactcaaaaagagagatacatacacatatataaacagacagagacacacacaggatgtctccatttatacaacatgtggaaaaggcaaaattatacagacagaaaatgggcttgtgatcatcaaggcctgggggtgggcaaagggatggactaaaaagtaataggaggaaatgtagggaagtgagggaactgttctctgtcttgactgtggtattgactgcatgatgtaattgtcaaaactttgagaattccacactaaaaagggtgaatattactgtatgtaaattatacctcaataaatacgaccttaaaatattacagtcatgttcacacaaaaacctgcacacaggtgtttatagcatctttattcataatcaacaaaacttggaagcaattaaggtgtccttcagtaggtgaatggataaataagtcatggtacttccagacaatagcatattattcaatgagaaaaaaaaaaaaaaaagagctagcaagctacgaaaagacatggaagaaacttaaatccacattactaagtgaaacaaatcaatctgaaaaggctgcatactttatggttcagaggcaaaattatggagacaaaagaaaatagccaggagtttagaggagtaggcgaaacacagaggattattgggacagtgaaacggctctttatccttctgtaataatgcatacatgtcattattcatttgtctcaacccacagaatgcacatcaagactgaaccctaattaaaccatggactttggccgatagtgtcaatgtagtttcatcaattgtaacaaatgtaccactctgaagggggatgttgatgatgggggaggctgtgtatatgtgagggtaggggatatatgggaaatctctgtaccttctgccccattttgctgtgaacctaaaatttctctaaaaactagtcttttatataaatgggcatacatatacatatatatgtcagcactaaaatatcacgttacaataaatataaaggagaaattattgaaagtcatgtacagtgaaatgtgttttcctccatatttcctggaattcatgaggagtgatacacttaggagtaaggtaaaatgggaataatgaaggggaccagaccttgttctagggtatgttaggaaggaagaggtgatctccaggcaccctcctgagagtcagctgacattgtcctaagttggggataatgttgtatcacaaaatatccaaaactgaaggaagaatagtgaagcttcagatacagtgctggatgaggtgaagggaggtaatgggtgagcagacattggtctaagatgttgagcagcatgtgatgggccatcagatactgtgaagaagtgaggaagcagagctaatgatggctcagtagacattgatctaaggtgaggtaatgggatgtgtcaccaagcactgcccaactagggcttgggaattaaaggggcattgtggccctgcttctttgactatgttctatcctttgggccccatcttcacctccccatactgcccttcttaaaggtgaaaccatctttgcagagcccaaatagttcccactcccagaactgccaatagactggccccagacgccacccagcaactgtgcatctaatcagatcatctgtcagcatctgtaaggccactgctgcctatctagggcaagatacctaatatccaatgaagatccacccaagtctgctctagttccctgctattggcttcaggcactcctctcggggcaggatgagcaggtgtgtggattgggttctggagtaaatgcggctctgtcgagttgcaactgagacaggacagcgctgtgcatgctgaggaaaaatgagcagggagtcttttgcaatcatgttggagctgtgggattctggaatcatggcaggaaatcctggaagcaagcatccacatgggatttcctgtacctgttttcccttctttagcatcagaccaaaaggttcacaatgactttttagctttagggttgagaagggatacagcccaggtacagactagaggtgaaaaagcctggtgtgttttagccaagttggttctccctattagcgcttcttatgctgcaacacagaaaaaaatcagacagaagtcacgcaacaagcatgggtcaactctccacaggtgcatttatggaatgcctgctgtatggcagtcatgggtctagactcatagtggtgaacaaaagggaaatattttctagtgtagaagccacagagaaatgaggaaaatacaccaggcagcatggtggaaattgctagggagaagaataaaggaggaagggtaaggggctggaattttaaaccaggcaggcagggaaggcctgtgtggaggtgtcatggaaaaaaagacatgacggacaagccacagataaaataaagaattgtgctctttgcaacgggcactgcaaatacaaaggccctgagtcaggaactgatgtttgaggcacatggcggggaaggtccttgtggggtgcgtgggacgaagatggacacaagtagacagtgaacatatggtggggttggttttcatatgagttatcaatttcatatgatttatgatttatctcatatctcatataatgtaagataatgatttcatgacttatcaacttatgaaagtcagatcattaaggaaagtaaaatgctgggcttcaactcagtcacaagtaaattaaaaaaaaaaaagaggcaggcaactgagtgagaagaattgtaatagcagaaggaagaatttaagttctcccagatgacctgaaaatcctaacctcaaaggctttcttgagggtggtgggagtgtacaaaacactgtgctgggccgggcgcagtggctcacgtccgtaatcccaggactttgggaggccgaggcgggcggatcatgaggtcaggagttcgagaccagcctggccagcatggtgaaacccccgtttctactaaacatacaaaaattagctgggcgtggtggcacacgcaatcccagctactcaggaggctgaggcaggagaattgcttgagcccgggagacggaggttgcagtgagccaagatagcgccactgcactctagcttgcccgacagagcaagactctgtctcaaaaaaagaaagaaagaaagaaagaaagaaagaaagaaagaaagaaagaaagaaagaaagaaagagaaagaaagaaaaagaaagaaagaaggaaagaaagaaagaaagaaagaaagaaagaaagaaagaaagaaagaaagaaagaaagaaagagaaagaaagaaagaaaaagaaaaaacactgtgctgggtgtcaaacacaatgtgctgagaacctgtggggctcagagagagtcctggcagataatgaaggggactgtaagtctttttctatgacaatggggactcaacatacgctctgaggtctgtgtctgaatacacagggagtttgtcttattgcagtatctcttgcttgatagaaatactcaatggggaattggatatgcacaactgtgttcgattcaaaagaagaaaatacccacaattctactagacagtgtgttctggaacaaacaactcacagaaggattcatcactatcatatatattatgttgtcttaccattcaaactgttggcactatacctaatccacagtaaacaggattatcattcccataatatgatctttcttatgaagaatttggtaacagtattctattgtagttttcatgagaaggcttttcctattcaccaaattgactcggttccttgtcagtatgaataatgacccaaggtttactggggatggtgacaatgtaggaagggtccctcgcctcattcagtgccttctcagaggccctctccagaacagccatgtgtgacattctgatgtggtcatttctatttacaataatatacatatttttctgctgcatgcgtgcaacagtgtacaatcagacccaaccctcaggggggttttctcacactgtttctctcaagcgtggctgctctgatgaacactgaacactgatttctgaacgaagcctttcccacagatgccacacttgtagggtttgtctccagtgtgtgttgtctgatgtttattcaaattggacctgttgctaaaggccttcccacactcagcacacacgtaaggcttctctccagtgtgaattcgctgatgcacttggagctgtgattttttagtgaaagacttcccacagtcactgcactcataaggtttctctccagtatgaattctgtgatgtgtaatcaactctgacttctgtcgaaaggtcttcccacattcagaacaaatgtagggcttttctccggtatgagttttctggtgcttactgagatttgacctgccactaaaggctttcccacactcggcacacacatagggtttctctcctgtgtgaactggctgatgcaccaggagctgagacttggaggtaaaggacttcccacagtcactgcattcataaggcttctctccagtatgaattctttgatgagtaataaagtttgacttgcggatgaaagctcttccacactcagtgcatacatagggtttctctcctgtatgaattttctgatgaacaatgagtattgatttctggttgaaggctttcccacattcgtggcattcatactgtctctctccagtgtgaattttctgatgtatattaagatttgacttctgagtaaaggcttttccacaagtattgcattcataaggcttctccccagtatggattctctgatgtgtaatcaagtctgacctctgggtgaaggcctttccacatttggaacatatataagatttctctcctgtatgagttttctgatgtgtaatgagatttgaccggttggtgaatgccttcccacatttattgcatacatagggcttttctcctgtgtgaattcgtttatgaacatggagttgtgacttggaagtaaacaatttcccacagtgaccacatttataaggtttctctccagtatgaattatttgatgtgtaatcaagtgtgccttccggatgaaggccagtccacatttcatgcatatatacgatttttctcctgtatgaattctctgatgcactgtgagtgctgacttctgagtgaaggctctcccacagtcactgcattcataaggtttctctccagtgtgaattctctgatgaataatcaactctgacctgtaggtaaaggccttcccacactcagtacatatggaagatttctctctactttgaatcttctcatgtgtaatgaggttggaattattgctgaagaccttcccatattcggtacatatatagggcttcactcttgtgtgaacacgttgatgtacctgaagttgtgacttggaaatgaaggatttgccacagttattgcattcatatggtttttctccactatgaattcttcggtgtgcaatcaattgtgttttctggatgaaggcctgcccgcattcaatacagatgtaggatctctcgcctgtatggattttctgatgaatcttgagtgtggacttttgtgtgaacgctttgccacagtcagtgcattcatggtgtctctctccagtatgaattttctcatgtatactgagatctgagttataagggaaacctttcccacattcactacattcatatagtttttctccggtatgaattctgtgatgcctgaaaagagacgatacttgaaaaaaggattttccacattcattgcacttatagggcttctctctcatatgggttttctgatgtgtgatgaattctggcttctgtacaaaagccctcccacattcaatacatacatagagtttttctcctgtaggaactttcagatgtaccttgaactgtgacttccaggtgaagctctttccaaattcagcacactcataggatttttccccagaataaattttttgatcttgagaggaagctggtttataaccgatgatttttctatgttgattatggtcccataatttctctcctgttggagtacattcacagtaagtatagaaagacattttaccatagttagtactcttcttaacattctttgaagcatcgtttctatcatgaatgtgtagatctaaattatgcttcaagccatttccaaataagtcacactgatagggtttttagggggatgtaaaatgtttgggttcacatgaattatccttctgatagccttatattcataatgcctatttgtagtcaatattttcttgattaaagcaacatcacttagatacttattttcttttctgataatattctatctggttatcagtctgtcactgttattctagaatgaaatacaatctcacatcatctctatcatcatcttccctttcattgtggaaagaagtcttttttttttccagagattccctgtaataaggtttgaaatccaaacactttttcaagggataataagtcactttttgcttatagagcagctagcagaggctagaggggaaggtaaaaatggcttatccagcttgaacacagagaaaagggtaagggtgagtaatttcatgagaagggtgtgacactacttaaatgaaacattctggggaacaattcagcagttaaaagaaataaactagatgaacagataacaccatggatagacatggaaaaaggcaaaaaacatgatatatagcataataagatttatataaactaatgatccatgcccctaattcactttaaattttacaacatgcacgaattaaaaaatgcttccattatacaaaacagtggcttctggtgggaaggcagatgggtgaggggaaagagagaaaaggggatattatcacaaaaataaaatgagaatcttcacccacattttcatggtcatagtgtgtcctaaactaaagacaatgattaaactcaaacctcatcaggtgaaatataaaaataaagcaatgacaaaaacaaacaagcccgggcatggtgcctcatacctgtagtcccagcactttgggaggctgaggcgggcggatcacctgaggtcgagagttggagaccagcctgaccaacatggagaaaccccaactctactaaaaatacaatgttagctgggcgtggtggctcatgcctgtaatcccagctacgtgggaggctgaggcaagagaatcgcttgaacccgggaggcggaggttgcagtgagccgagatcgtgccattgcactccagcctgggcaacaagagtgaaactccgtctcaaaaataaataaataaaaataaaaatacaaaaattagccaggcgtggtggcccacccctgtaatcccagctactcgggaggctgaggcaagagaatcatttgaacctgggaagtggaggttgcagtgagccaagattgcgccactatactccagcctgggcgacagagtgagactccctctcaaacaaacaaacaaacaaacaaagccaaccaggaagagagaccctaacagtgtggaatcgctcaagcaacatcagaaggaaatgtgagaaagggtgattaatccatgccatgtcaaacacagcagagaggtattcccaaagattaagtgacaatgattcccaagtcattagctggatgaaaggcctgaaggactgggaagataagagaaatctcatggccattactatagcaaaaatagttagagagcctgactggaaataaagttcttttttttttttttctttttcagactgagtcttgctctgtcacccaggctggagtgcaatggcatgatcttggctcactgcaaccttcacttcccgggttcaagtgactcttgtgcctcaccctcccaagtaactgggattacaggcatgcaccactacacccagctaatttttgtatttttagtagagatggggttttgccatgttgtccaggctggtttcaaactcctgacctcaagagatacacccaccttggcctcccaaagtgctgggattacaggcatgagcaactgtatctggcccagagataaagttctgaggcatctcacagtgagaaagacagaaataaaaggggtgtagcacgagtgggagtgtgtgacacagagtaaattttgaaagaaagcagatccaggaatacctggatgtaaacgagagactctaggacaatatggaaggcagggaaaaaaagactgttacagaaaaggaatataataaagatttatctttaatgaggctgactggcacatgacttataatcaacaaggaaggtcatccaggtagaaggcatttagtgatctgagaggcatcaagcaatataaaaaattcagagccttactgaagagtggtcttaatagcacttcacaggttccagtgtttttcaagacagctgagatttcctcctgtctcccatctaacctgagtcacattcacctcacttcactcacctgggcagctgtgacgtggcctctcaccctgcagtgcccatggttcctttccttgctccaacatgaccacctctggtttaggaacttgataccctgttcatgggaaatgataaaggtctgggtccagctaattacgtttcagagcccaacaaatacagtcttattgttcaatgatggtttgttctttaggaaagtaaccagatatctctgagtaatattctgagtaccctaaacaaacagagaaccctggaggaaaaaaggacaaaaccatcacctatctaagatgccaacagcattcgtcaactgagaatgaaaacactctcagtgaggcctcctttcagataccaaggtgactgtgcttacctactgagagcaggtggctgtaggtctccagcatcacatcccggtacaggtttctctgagaaaggtccaggtgccgccattcctctctgctgaaatcgatagccacatccctgaaggacactgatccctgtaagggcacattcctgttcaatgtgcatagtcagctttgcacggtggagtgactatatatgggattacggaacatgggttttgttgtttttaatttacttcattttttttttgagacagtcttgctctgttccccaggctggagtgcagtggcgcgatcttggcttactgcaacctccacctcccgggttcaagtgattctcctgcctcagcctcctgagtagctgggattacaggcacgtgccaccacacccagctaatttttgtatttttagtagagacggggtttcaccatgttggccaggatggtctcaatctcctgaccttgtgaccttgtgatccgcccacctcgacctcccaaagtgctgggattacaagcttgagccaccgcatctggccgtttttgtttttgtttttgttttttttccttgagatggaatttcactcttttggcccaggctggagtgcaatggcgtgatcttggctcactgcaacctccacctcccaggttcaagcaattctcctgcatcagcctcctgagtagctgggattacaggtatgtgccaccatacccggctaaattttgtatttttagtagagactgggtttcaccatgttggccagaatggtctctatctcctgacctcgtgatcttcccgcctcggcttcccaaagtgctgggattacaggagtgagccaccgcgcctggccaatttacttcctttttaaagaacctgccactcatttccctaatagcttattacgaaaaattttaaacatacagaaaattagaaagaattgtacagtaaaaacctatatatctactacttagatctaccattaacaccttaccctacttgcttcatcacacattgatccatcttacttttttttatgtatttcaatgtaaattgcagtcatcactacactttctcttaagcaccacaaaatgcaaattattaactagggtgtaacatttgttaacctgataaggtaaaatttagtacaatacaaataaatgcaacaatctttattttgccatttgaccttgtgacaaatgtatacacctgagtgataagaaatttctaagaaataatattttacataggtcacatattaaatatccagttttagctggggtgcagtggctcacgcctgtaatccaagcaagaatgtcagagggggccggacacggtggctcatgcttgtaatccaagcactttgggaggccaaggtaggtagatcacctgaggtttggagttcgagaccagcctggccaacatggtgaaatgccgtctctattaaaaatacaaaaaattagccaggctggtggcacgtgcctgtagtcccagctatttgggaggctgaggagggagaatcacttgaacttgggaggtggagtttgcagtgagctgagattatgccacggcactccagcctgagcgacagagggagactctgtctaaaaaaaaaaaaaaaatctagttttacataatttgtggaacacagaaatctaacaaagaattccagctatttgttctgttctacagtcagtcaatcactcatttttcaaaactggccattgaaataggctgtcttggctgggcccggtggctcatgcctgtaatcccatcactttgggacgccgaggtaggtggatcacgaggtcagacgttcaagaccagtgtggccaacatagtgaaaccctgtctctactaaaaatacaaaaaattagccgggcatggcgagcacctgtaatcccagctactcaggaggcttaggcaggagaatcgcttgaacctgggaggcggaggttgcagtcagccgagatcatgccactgcattccagcccgggatacagagcaagactccatctcaaaaaaagaaagaaagaaagaaataggctgccttttagtcttctagcacatggatgaacaacctgccacacagtggctgatcaatttaggaccagtcattatgctactcctgaggacacagaaatgaattatttatgttactagtcttcacgcaacctgaaatacatagaaaataaataagaccaaagtttgaaaaagtgaagacattaagttcattaaggtgctgaaaagtagatctctatctgagacaccctgagggctaaaaagaagaaaaagtgcattctacatgaggaaataagtttacatttcatagagcggaagaatttaacttggaagataagaagagtaatacaaagtatggggtaagggggacattgcccagcaaagacaagaacaaaaagatggggagatgggctccagtgagccacgattgcatcaccgcactccaacctgagtgacagagcgagaacctgtctcaaaaaaaaaaaaaataaaataaggccgggcgcagtggctcatgcctgtaatcccagcactttgggaggccggggcaggtggatcacctaaggtcaggagttcgagaccagcctggccaacatggtgaaaccccatctctactaaaaatacaaaaaattagccaggtgtggtagtgtgtgtctgtaatcccagctacccaaggcagaggtaggagaatcgcttgaacctgggaggtggaggttgcagtgacccaagattacgccactgcactccagcctgggtgacagagtgagactccatctcaaaaataaataaacaaataaataaatattaaaatacacaatgagggccgggcacagtggctcacgcctattatctcaacaactggggaggccgaggtgggtggatcacgaggtcaggagtttgagaccagcctggccaacatgttgaaaccccctctctactaaagatacaaaaaattagctgggcacagtggcacatgcctggaatcccggctacttgggagactgaggcaagcgaatcgcttgaagccaggaggcagaggttgcagtgagccgagattgcgccactgcattccagcctgggcgacagtgcaagactccatcttaaaaacaaaacaaaacaaaaaaaaacaccacatgagtttaaagaacagcaaatagggctggacatggtggctcacacctgtaatcccagcactttgggaggccgaggcgggcagatcatgagatcagaagattgagaccatcctggctaacatggtgaaacaccatctctactaaaaatacaaaaaattagctgggcgcagtggcgggcgcctgtagtcccagctagtcaggaggctgaggcaggagaatggcgtgaacccgggaggcagagcttgcagtgggccgagattgcaccactgcactctagcctgggtgacagagcaggcctctgtctcaaaaaaaaaaaaaaaaagagaactaaggccagggcaggggctcacgcctatagtcacagtattttgggaggccgaagtgggtggattgcttgagcctaggagtttgagaccagcccaggcaacacagtgagaccctgtccctaaaaaaataccaaaaaaattagccatgcctggtggcaggcacctgtagtcccagttactcgggaggctgaggtcggaggatcgactgagcccgggaggtcgaagctccagtgagccgttaatgcaccactgcacaccagtctgggtgacagagggagaccctgtctcaaaaaaataaataaaacttaaaaagtaagagacttacgaatcatactaaccaaatgcaccttgtggactttggcccctaattaaaatgaaccaatcttaaaaagatatttacaacaatttagagaaatgcaagcaatgggtattagatgataacaaagaattactgttattttgttgtaggtgtgatattgacttatttgttatgctaaacaaaagaaaaaagaattcatctctttgagatacatatcaaagtatttttagataaaacattgtgtttgagattcactttaaaataatccaggagctgtgtaggaaggtggtttcagatgaaataagaatggcagaatgttgatgatgactgaaactgggtaaaaggtacaataggtgaacaggttgcttatactattctctttacttttgtatatatttaaattttttcgtaataacatgtttttgaaaaatatgatcctccaaataaaaaatctaatttggaattgcacagttaaaggaatgcctatttccacatggtgtacatatttaaagaaaagtattggctgggtgcagtggctcacacctgtaatcccagcactttgggaggccgaggcacatggaccacctgaggtgaggggttcaaaaccagcctggccaacatggcaaaaccccatctctgctaaaaatacaaaattagctgggcatggtggcgcatgcctgtaatcccagctacttgggaggctgagggaggagaattgtttgaacctgggaggtggaggttgcagtgagccaaaatcacgccattgcactccagcctgggcaacaagagcaagactccatctcaaaaacaaacaaacaaacaaagtatactagggacttgaatacccttccctcacctcagcaatttatcaaaatactagacaggaaatcatcaaatatacagaaaaagaagcaacagtatttaattgatatttatagactactgcaacaaacaacagcagaatacacattcttttcaagaatcatagaaaaatgaccaagatagaccataccctaggctataaaaccaacctcaacaaatttaaatgaataaaatacaaagtatgttccacaaggaaatcaaacaaaaaatcaataacagaaagaccacagaaaagtctccaaaggaattaaaaaataaaaacaaaagctttctggaaaagcaaaaactatttggaaattaataacccacagttaaatgacctataggtcaaagaagaaatctcaaaggtcattttaaaaataaatacacctggccgggcatgatggctcagcctgtaatcccagcactttggggggccgaggcgggtggatcacatgaggtcaggagttcgagaccagtctggccaacatagtgaaaccccatctctactaaaaatacacaaaattagcagggcgtggtggcacgcacctgtagtcccaactacttgggaggctgaggcaggagaatcactggaacccgggaggaggaggttgcagtgagccgagatcatgccactgcactccagcctaggcaacagagcgagactctgactcaaaaaaaaaaaaaaaaaaaaaaaaaaaaattcaggaaaacaaaacaaaaaacagaaaaaaaaagtcaataaaacacaatccagttgttggggagaaaaaatcaacaaaatgcggctgattggcctgttagtcaactagactgatgaaaataaaaagacacaaatcagcaatatcaggaataaaacaggaaatatcatgacagattcaggaaccattaaaagaaaaatatgggaatacaaacacttatttagataaactaaataaattagcttatttagataagataaataatcttataactattaaattacattcataatttaaaagttggtgaaaagaaatttctaggcctagttttgccagagaattctaccaaacttacaaagaagaattagtcttggccgggtgtggtggctcatgcctgtaatcccagcactttgggaagctgaggcgggcagatcacctgaggtcaggagttcaagaccagccttaccaatatggagaaaccccgtctctactaaaaatacaaaattacctgggcgtggtggtgcatgcctgtaatctcagctactcgggaggctgaggcaggagaatcgcttgaacccaggaggcagaggttgcggtgagccaagattgtgccactgcactccagcctgggcaacaagagcaaaactctgtccccctcaaaaaaaagaagaagaagaagaattaatgtgatttttacacaaactcttccagaaaatcaaagaggaagacctcttccaaattaactttgtacagccagtattactctgacatcaaaaccaaagaaagcacaaaaaaagaaaactatagaccagtatctttcataattttaggtacaaacatcctcaacaaaatatcagcaaacaatccagcaatgaataaaaagaatcgtgtactacaataactgaaattcatgggggaaccctctgtatcattttgtaattctctgtggatctataattatttcaaaataaaaagttttaaaaaatatactcctaaagaaagattattccaaaacatttggaatattttggaatagttatgactggaaaatcattgacaagactcactgtacaagtcacatgagagaatgtgaattacagttcacctttgaaccacatgggtttgaactatgtgggtccatttgtaacacagatttcttttttcagtaaaattacaccgagtgtgcctccctctcctgccctcccttttaccttcacctcttccccctttgccacccaaaacagcaaggccaaactctcctcttcctcagcctccttaacctgaagaccataagggcaaagaccttcatgatgattcacttccacttaataaataataaatatattttctcttccttttgattttcttaaaagcattttcttttctctagctgaattttattataaaaatacagaatataatacatataccatacaaaatacatgttaaccaactctttgctatcggtaagttaacagcaggctatcagtagttaagtttcagggatggtcaaaagttatacacagcttttcaactgcacagaggttagcgccccaagcctgcatcgtttgaaggacaactgtgcttagtataattgcggtttctgccattttttctttttattatactttaagttctagggtacatgtgcacaacgtgcaggtttgatacataagtacatatgtgccatgttggtgtgctgcacccatcaactcatcatttacattaggtatttctcctaatgctatccctctcccagccccccaccccacaacaggccccggtgtgtgatgctccccaccctgtgtccaagtgatctcatagttcaattcccacctacgagtgagaacatacagtgtttggttttctgtccttgtgatagtttgctcagaatgatggtttccagcttcatccatgtccctacaaaggacatgaaatcatccttttttatggctgcatagtattccatggtgtatatgtgccacattttctcaatccagtgtatcactgatggacatttgggttggttccacgtctttgctattgtgaatagtgccgcaataaacatacatgtgcatgtgtctttatagtagcatgatttataatcttttgggtatatacccagtaacgggattgctgggtcaaatggtaattctagttctagatccttgaggaatcgccacactgtcttccacaatggttgaactaatttacactcccaccaacagagtaaaagcgttcctatttctccacatcctctccagcatctgttgtttcctgactttttaacgattgccattctaactggcgtgagatggtatctcattgtggttttgatttgcatttctctgatgaccagtgatgatgagcatttttttcatgtgtctgttggctgcacagatgtcttcttttgagaagtatctgtttgccattatttttaatggcaaaaccgcaattacttttgcaccaacctaatacataaagtaaggctataatgttaacagggatgtagaaggaaaatggcactaattattagggaggcagacctgatgttgaatatgaaggtgagaaaaaggattaagaaataattcttagtcatcaattttgtgtcactatgtacattctggtgccaggaatgtgtagagaaggctgaggaaataaaaaaaaatgacttaaattttgtatatgttgagatttagctgacaggatatatacgagggtgtacactaggtggtggatagagagcttatgattaattgtgatagagattagctgaatagagagcttatttatttattttattattattattttttgagatggacttttgctcttgttgcctgggttggagtgtaatggcgtgatcttggcttactgcaacctccgcctcccgtgttcaagcgattctcctgcctcagcctccccagtagctgggattacaggcatgtgccaccatgcccggctaatttttgtatttttagtagagactgggtttcttcatgttggtcaggctggtctcaaactccctacctcaggtggtccaccagcctcagcttctcaaagtgctgggattacaggcatgagccaccaggccaggccattccagtgttttacaagcactttgggaggccaaggcgcagatcacctgaggtcaggagttcaatatcagcctgaccaatgtggagaaaccccaactctactaaaaatacaaaaattagctgggtgtggtggcacgtgcctgtaatcccagctacttgggaggctgagacaggagaatctcttcaacccaggaggcagaggttgcagtgagccgagattgcgccattgcacttcagcccgggcaacaagagtgaaactctgtctcagaaaaagaaaaaaaaaaaaaaaaagaaagctatattattaatatagtcacaatattatttattgtataaagattcagaggtcctttgtatagaggtcactggattcaggggagggtatgagcatgcagatggaagtggaaagaaaagtactaaagatatttataatttttaatatgtaaaattatgatttttgaaagctaccttgttgatttcttcatttaactgcattcagagattacagtttgtctcttgtgatgcatattgattgtgcttatagggctcagaacatcatttctttgaaaatggtacctatatacctgaaaagaatatacatgttctaatttttctctttatcatacacttgtatagtcacaccctacacacaccaaactccccaacccccaaaccctatgttatcaagaatttagtaggaacacgagatgtcatgttaggctggaatagagctttaccacctcaccaaatgagcttcttatacacagtttgtccaggctgggtgcagtggcccatgctgtaatcctgggattttgggaggctgaggcaggcagattgcttgagcccaggagttcaagacaagcctgggtaacatggtgaaactgtctctacaaaaaatacaaaatttcgccagttctattggcgcgtacctgtagtcccagctactcggcaggctaaggtggggggatcgattgaacctgggaagtccaggctacagtgagccgtgattgcaccacagcactccagcctgaggatagagtgagaccccgtttcaaaaaacaattaaaataacagtttgtccaggaagaaacctcctcactcaaagataatactaagcatcgcctaatgtacaaagatactatgagcaaaaaggataaaacaaaaatagagaggagattaaaaggaatacactacaaataatatactacaaataaattgacacacaacagaaaaaacatccaccatgaattcaaggaattcactataattataactacttaaaataattaaacaggccaggcgctgtggctcatgcctgtaatcccagcactttgggaggccgaggtgggtggatcatgaggtcaggagctcgagaccagcctcaccaacatggacaaaccccgtctctactaaaaatacaaaattagctgggcatggtggcacatgcctgtaatcccagctactagggagtctgaggcaggagaatcgcttgaacctgggaggtggaggttgtggtgacccgagatggcgccactgcactccagtctgggcaacaagagcgaaactccgtctcaaaaataaataataaaataaaataaaataaaataaaataaaataaaataaaataattaaacccaaggaagaaatagtggaaaaacagataggctaagaatgtggttatgtaaatttttgaaaaataaattggcagaactcagtaaagtttttttgtttttcaagcaacacagaaataaaggtctccttgaaagcaatgaaaagaccctgctaaaacacaaaaggtaggccaggcacggtggctcacgcctctaatcccagcactttgggaggctgaggtgggtagatcatgaggtcaggagctcgagaccagcctggccaatatggtgaaatcctgtctctactaaaaatacaaaaattagccaggcatggtggcgcgcgcctgtaatcccagctcctcaagaggctgaggcagaagaatcgcttgaacccggcagatggaggttgcagtgagccgagatcgtgccactacactccagcctgggtgacagagcaagattctgtctcaaaaaaaaaaaaaaaaaaaagcacaaaaggtggcaaagacaagtgagcaacataaaatggaaataaggagtttcaaaaagaaaatagaaaaaaagaatttaataaaaacatctaattaaaaaatccttgaagtggcagtatagaacttttattgttattcacagtataaatttaatagtcttaaacgatagatataaagattgggttaaagaaggtaatgttataaagccgccactaaaagaacaaaagaaaaaacagaggccaggcacggtggctcacacctgtaatcccagcactttgggaagctgaggcaggcggatcacctgaggtcaggagtttgagaccatcctgcccaacgtggtgaaaccccatctctactaaaaatacaaaaattagccgggcatggtgacacacacctgtaatcccagctactccagaggctgacgcaggagaatcgcttgaacccggaagccagagactaccataaggcaagatcatgccattgcactccagcctggcaacagagcaagactccgtctcaaaaaaaaaaaaaaaaaattatctttccactgccatacagaagaaatgtacaaggactccaaaggatgacagtaaaaggaggagcaaaggcctatctggaattgccaaaggaaaggaagcaagaacctccaccttaatatttgagctgaattctcaccaaaaaaattaaatatgacaaggacacaatctgaaatgaatctcagatgccattactgtcactgcaccaaattacatagcatcaaaatttataaactataggaaactataggaaaataatagcaagaaatacattggtggtgggaaactttacataatatctcccagctccatttgataaagtagaaaaaaatcattaatactatgaaagcctcataactatataagatatcttataagttaccaataaaatcttattgctaagatatcaaattctatatcctggaaacagatttcctgtttacacagtgccggtgtaacattcagaaatgttaaacataaaattttcaaaacaaaaaacacaaaaacctttaatgttatgccacatgcaaataattctctccatctctgcaatcctaattttattaaaagtagaatattttaaatgaaagtcttaacatgtagaaatgaaaatgtggtaagtggtcaatgaagacttggtgcttggtgggaaacaatatgttactagaatttcattctttttttctagatttttaaatgtaattgcataaggtaaattacttctctaaattatttttggtactgttttgctagactgtgtaccattacttctgatatacagtatttttttgaggtattttactattttagtttttagacttctttgactttggactgggctgctgaatgagaaaacagtgcttgcttcacttttttcccagtgataaactattagtctactgttttcatctactcttttttttcttttttgagacagagtttcgctcttgttgccccggctggagtgaaatggtgtgaactcaccgcaacctccacctcctgggttcaagtgattctcctgcctcagcctaccagtagctgggattacaggcgcccgcctaatttttgtatttttaatagagacagggtttcatcacgttagccaggctggtctcaaactcccgacctcaggtgatccaccctccttggcctaccaaagtgctaggattataggcgtgagccacggcacccggcctcatctactcttgaatacagttagtgaatacatttgacttctgaatctatttatttccagttcttttgggcattgaagttaactctgtaaacaaaataaaacaaaaacctgaaacaaggttgagaataatttctgatattatctgttactcaaaactttggcatgaaaatcaactgtaaaatcacatgatcttttccatcatttttgactgcgttgggggtgttgaatcaacattttaattcctttaagggcttctgtataatttgttcttaccgagttgaaaatttatttcttataaaatttcatccttttgtttaggttttcatatatttgcatggtttttttttttttttttttgagatggagtttcgcgcttgttttccaggctggagtacaatgacgcaatctcagctcactgcaacctccgccacctgagttcaggcgattctcctgcctcagcctcctgagtagctgggattacaggtatgtgccaccatgcccagttaatttttgcatttttagtagagacagggttttaccacgttggtcaggctggtctcgaactcctgacttcaggtgatccactggccctggtctcccaaagtgctgggattacaggcatgagccaccacgcccagccctatttgcatgattttacataatactcactcgtgattgtttgaatcttaggtatagaagtaactattactcctgttttctaacatattttgattatgtttatcttcactcttttttcttgatcattaatatggagaagcaacttgtgtttctgtcacatttttatcaaccattttttgttctctgtgactcatgtctttgcttttctttttttagtcctcgttcttttttgtattttttgactcattctttttgtaacttcttcagttgaaaccataactgcttttttcccaaaatttctaagattccttaaaaggcacttaatctatagttttcccctctatctacagtttagctttaccacacgaactttaaaatgtagtactttattagcagggcacagtggcaggtgcctgtaattccagctaggagggaggctgaggcaggagaatcacttgaacccaggaggcagaggttgcagtgaactgagatcgtgccaccgcactccagcctgggcaacatagtaagatcttgtcacaaaaaaaaaaaaaaaaaaaagtagtactttattgaactattttgcgttgtggtaaaatatacataaaatttgccattataattatttttaagtgtccagttcagtggcattaagtacattcacattttgtgcaagagcctttctgttttgttttgttttggtttttgagatggagtttcactcttgttgtccaggctagaacgcaatggtgtaatctcggctcaccgaaacctccacctcccgggttcaagcaattctcctgcctcagcctccagagtagctgggattacaggcatgggccaccacgcccagctaattttgtatttttggtggagacagggtttcactatgttggtcaggccagtctcaaactcccgacctcaggtgatctgcccgcctcggcctcccaaagtgctgggattacaggcatgagccaccgcacccagccttcaagagccttttacttatttgtaatttaatgctctttgtcagaaaacaatcaatattatagcaaagatttatattttttatctgctttgatcaataagcttctgaaagtagtgtgataaaatggccaatattgcatttaatgatttctgttcatttttacttaaaatagttcaaagatacattattaattaaaaaaatgctaataatttgtataattctttgtacatgattcttttcataaggatgaacaacatgttttcatccctttaggtgattttcatcttaaatcccttttgatctgttcctaaattgcagccctagctttcttttggctcactctcttatttttaaatgaggacaaaagcagtcctaacctctgagagttagcctcgtactatcaattaagcctcagtgttgctagaagctaacctggcaagggccagctaattcatggtgttctccatggtgctacacaaaaacaatctcttagaacaccaacagcaaacaagaccaatctctgaccatcatggtgtaagatgataccaagaccactctgtcgttatatttgagcatagacaaaaatcagaacattcttcaaaccacaaaagtgaataaaagtctccttattctgcctaatgcaagagactgctgcttttttcttttgagacaaagtctatctctttcatccaggctggagtgcagtggcatgctcatagctaggtgtaatctcgaactcttaggctcaagtgatcctcctgcctcagcctcccgagcaggtgggtctataggcacacagcaccatgccagactaattgtttttcttttttttttttttgagacagaggctcactctgtcacccagactggagtgcagtggtgcaatctcagctccctgcaacctctgcctcctaggttcaagcgattctcctgcctcagcctcctgagtagctgggattacaggcgtacgccaccatgcctgacaaatattttttatttttagtagagacggggcgtcaccatgttggctaggctggtctcgaactcctgacctcaggcaatctgcctgcctcagcctcccaaagtgctgggattataagtgtgagctaccgcaccaggcccaaactaatttttaatttaattaaattttttttttggtagtgacagggaatcactacattgccagggctggtcttgaacttctggcctcaagccatcctcccaccctggctttccagtgttgggattacaggtgtgaacgaccgtgcccagccaactgctgctgctttaccaactgtaactttagcctcaagctatccttcctatcttctagaataaaattattaagatactcaatcctaaaactgcccaagagcaactaaagtagaggttcactgaggtgcagatgagactctcaccacgtgactagaaccctgaaatgaaattccactacttctaatatatccaatagaaagagaaggcatgacaatatccactgcgatattgttcataatagtttctgtattttaccaaacaaacattaaaacagcaatgtacaaaaaagttaatctgctatgccattctgaaatcaagagaaaaaaattgtagttgttttcatttgtatacagaactaagcaatcaaagaaaatgaataaagcaggttatcactaccgggagacacaggtagatggaaggcagaggtgggtgaaccacagtcccatctctttcaccataatacttttcaatatattgcttttcatatatttctaacttttgaactaggtatatgcattgcctattcaaaagattaaactattcctaataaattatcacaatatcttcagatggataagaaataacaatacacccaggccgggcatggtgtctcacacctgtaatcccagcactttgggaggccgaagcaggtggatcacctgagggtcaggagttcgagaccagcgtggcccagatggtgaaacaccatctctactaaaaatacaaaaattagccaggcgtggtggctcgcacctgtaatctcagctactcaggaggctggggcaggagaattgcttgaacctggatggcagaggttgcagtgagcggagatcatgccattgcactccagcctaggcaacaagagcaaaactccatcaataaataaataaataaataaataatttaaaaaataacattacatccatgaaataagaacgggatggcaataaaaaaaaatttaggaaacaggctgggaacagtggctcatgcctgtaatcccagcactttgggaggctgaggtgggcagatcacctgagatcaggagttcgagatcagcctgatcaacacggagaaaccccgtctctactaaaaatacaaaattagccgaacgaggtggcacatgcctgtagtcccagctatttgagaggctgaggcaggagaatctcttgaacccaggaggcggaggttgcagtgagccgagatcatgccattgtactccagcctgggcaatgagagcaaaactctgtttcaaaaaaaaaaaaaaaaattttaggaaacaaactagagtttttaaaaattaaaacattaagttaaaatgtggatagtggtaatgagaagctcaatagaagggctggaaggcaaaaggtgtcaaagttacccagaatggatagcaggaaatacatagaaaatagtagagaaaagaaatggagaagcaacatctgaaaaacaagtttcagaaagaaaacagagaaaacatttgtgtttgaggaggtggtttaggaagaaatgaaaaaatgctttcaaaatctcaaacaaaagtcacttctaacaaggaattctatttgcagccaaaacatcaatatagcgtgatgacaaaatcaacaacagttttccttgacagtgcacctctccactgtcacacaggtggcctccagagacggagacattacccacgtgttcattcttgacaggaagatcaagttttctttcaggagcaccaagtctagagtccagctggttcctaaggcctgtctgcctctgccctaaggctgtggtgacagattagagctatctactcttggactgaaattccaccccttgggactcctcctcctcacctcataggagctgccatgatcctctggagccagggctgaggatttctggggtgaggtccaactagctggcatggccacactggatctcaaccctttttgtctagggtgcctgaagtttagtggtcatctgtgaactcagcagagctgctccgaagaggtgggctggagtctggaggaaggtctggcccagggactccccagagacacccaagaacctagaaaaacaatgtccacgtagtcattcaacattcactacataaacacttcctggatacaccaaggtgcaggtccctgcgctagaaaccagagcagtggttcccaaacgtaggtatgcattcaagtcacctggagggcttgttaaaacatagtttaaaattctcaacttcaccccttcgatgggtctaaggtaggccctaagaattttattttctaataagtgcccaggaaatgctgatgctgctggtacaagaaccacactttcagaactgtggagaacagtgctgaaatatgggaaaagccatgaaatttagagtaacattactgcagatttgaactgcagctgtaccacttttcaacaatgagaatataaagaagttactcagattttgtttcagaaataaggatgaaaatgcctgtgtcacagttactaagattaaatgagattatgcttttaaagtactcaatgcctccctgccatgcaagaatcacgcaataaatatcagcaattaccatgcactatattaaaacgtaatacagaaaaccatgtcatcaaaacaagtaagataataaacatatcagacaatgttgatctatatatgaaataaaaatgatatgcgattgagtgtgcacacggcattcattgtatacatatccccaattggtgcatgcaattggccatgcatctggaataaaacaaactagatctccacctcacacaatatttttttcttttaagatggggtctcgctctgtggccaggctggagtgcagtgacacaacctcatctcactgcaacctccacctccagagttcaagtgattctactgcctcagcctcccaagtagctgggactacaggcatgcgacaccacgcccagctaatttttgtatttttagtagagtcagggtttcaccatgttggctgggatgatcttgatctcctgaccttgtgatccgcctgcctcggcctcccaaagtgctgggattacaggcgtgagccaccgcgcccaacccacctcacactattaagtagacaaattccaggagcactaaacatttaaatacatgcattttttaaaacccctaaggatattaaaataattttcagactatatatttgtatagcattgtggtggggtgataaggatcttattacacatgacaggaaacccagaagctataacagaaaaaaacaggtatttctgattatgtttcctaattatatgtttaaataaaccataaaattcgacataaagatatataagaaattttttcaatatgtgatgatagcttgcttgtaatgttaactctaagcaatcactaagcaaaaaaggccaaaaaaaaaaataaaagaaactggaaaaggtatgaaaattcagagaaaaggaagcaaatggcaattaacaaaaagataccaacttaactaaaagaaaaacgcgtcagaacaattagagagaaattttccttagaatcataaaagctttaaaaaagtaacagaccaagcacaatggatcacttgaggccaggagttcgagaccagcctggccaacatggcgaaacgctgtctctactaaaaatacaaaaattagccaggcgtggtggcgggcacttgaaatcccagctactcaagaggctaagacaggagaatagcttgaaccagggaagcagaggttgcaatgagcggagatcacggcattgcactccagcctgggcgacagagcaagactctgtctcaaaaaaaaaagtgacaacatccactgttggaaagcatttaggcaaattgcttttataaattattggttgaagcttgaattgctataatgtcttttgagctatttagtcatatctatttttttatttttttgagatggagtttcactcttgtcgccccggctggagtgcaatggcatgatcttggctcactgcgacctccgcctcccaggttcaagtgattcttctgcctcagcctcccgagtagttgggattacaggcacccaccaccacacccagctaatttttgtatttttggttagaggtgtttttccatgttggccaggctggtctcgaactcctgacctcaggtgatctgcccaccttggccacccaaagtgctgggattacaggcgtgagccaccaggcccggtcagtcatatctagcaatacactcaactgatcccaataatatagttttaaatatataaagcagaaacagaagaaaggacaggtggacaaataacttttccaatgtgagtagtttaccttcctcaacaaaataatctgtgaggagatacataatatatataacatatgattaatatccataacaatacaaattagagaacatattacactcttttcatgtaatagatgtgacatttatgaaaaatgaggaagaactaggccataaagcaattgttcaactgaagcatcacctacagacactaattgaaacataaagtgcacttcttttttttttttttttttttggtgctctgtggcccaggctggagtgcagtggcaagatctgggctcaccgcaagctccgcctcccgggttcacgccattctcctgcctcagcctccagagtagctgggactacaggcgcccgccaccacgcccggctaattttttgtatttttagtagagacggggtttcaccgtgttagcaaggatggtctcgatctcctgacctcatgatccgcccgcctgggtctcccaaagtgctgggattacaggtttgagccaccgcgcccggccataaagtgcacttctaaacagctcatgggtcaaagaaaaacaattactgaaaaaaatttttaaacacttagatttgaacaatacgaaactgctacacatcaaaacttgttaatctttatattacaggctgaaatggaaagaactgaactttcaactcaggtcagaaagcaagctgatcacagtcctcaccgaccaccatagctgaccctacaggccctcagtcactgaccacagactcccgtcactgacccccaaaccccaatcactcatcccaaagagccccatcaatgacccgagaaatccctgtcacagacaaccatcaacggacgtcacagacccccatcaccatgccccgaaaccaccatcactaattccacagacaactcctctattactgacttcacagaatccctaattgcaaccaaccaaaatcgtcacagagacctctcggcattaaaacgtgaaaatagtcctgacgccagcggcgaaatagccttcggggaccacttccacttccggtccgacttctagcacctccccttatggactgttgatattgcgcatgctctaaattaacttggaagccaatttcagcccacagtcaacagggagcacacacatatttagagacatcgtgcagtttccgtaatcggcgctcacgggcagagaatataaccgcgcccttatggtgtttatttgtgtgggtcgccatctttgatgcgtatcgattccgtacagtggaggagtccgcctcctggagtgttgactagagtaaggcaaggattttcacatagaatgcaagactgtaaccagtgtgaccacgcttgtacccaagaagaagttcctgaagataggatctggagctttatgtttttttttgtttgtttgtttgttttgagacagagtcttgttctgtcgcccaggctggagtgcagtggcgccatctcggctcactgcaacctctgcctcccaggttcaagcgattctcctgcctctgcctcccgagtagctgggattacaggcaagcgccaccacacccagctaatttttttgtatttttagtagagacgcagtttcacgtctctactggtcacgctggtctcgaactcctgacctcaaatgatccacccaccacggcctcccaaaatgctggggttataggcgtgagccaccgcctccggctgttatatttacaatacctaagttaccccttggttacggcacactgcagaaaacaacgatttactaggagaaaccatgggggaactaggaagccagggatcctgagagaaataagggagataagaggaggcatcaggatggtacaatctattttttggagacaccactcaggagaagggtggactgggatctgagttcactcctgggtgaaaccactaggcaagacggagttatgtcacagtaggtagtatcctgcaggaagggaggtacaatttttagtagttgaaaacacattaggaaatagggtagaagttgggttagtacaatcctcttctaggagataccatggaagaggggttagaagtctaagcatcccctttgaaacggctggtagaaggctttgggaggtatagatattttaatccccttaatctccatcagcatccaccctagctaactcaagcacaactatagtaagcagcaacaataaaaataataatagtcttggctggtcgtggtggttcatgcctgtaatcccagcactttgggaggccgaggcgggcacatcaccttaggtggggagttcgagaccagcctgaccaacatggtgaaaccccgtctctactaaaaatacaaaattagctgggcatggtggtgtgtgcctataatcccagctacttggggggctgaggcaggagaatcgcttgaacccagaaggcggaggttgcagtgagccgagatcatgccattgcactctagcctgggcaacaagagcaaaactccatctcaaaacaacaacaacaacaacaacagcacaataataataataacagtctttaatatggccaacgtgtgactaaaaacacctgaagaaaatcttgctttttttttttttttttttttgagacagagtctcactctgtcacccaggctggagtgtaatggcacaatcatggctcactgcaaccttgactgcccaggctcaaaagcaatcccagctgggcgcagtggctcatgcctgtaatcccaacgcattgggaggccgaggcaggtggatcatgaggtcaagagatcgagaccatcctagccaacatggtgaaaccctgcctctactaaaaatacaaaaattagctgggtgtggtggcgtgcgcctgtagtaccagctacttgggaggctgaggcagtagaatcacttgaacccaggaggtggaggttgcagggagctgagatggagccactgcactccagcctggtgacagagtgagactccaaagaactgggattacaggcgtgagcctccgagcccggccagggagttttgtttttttttttttttgattgcaaagagatgttgaattttgtcaaatgctttttctgtttctattgagatgaccatatgatttttgtccttcattctgtcaatgtgatgtattgcacatactaatctgcatatgttaaaccatctttgcttccctgggataagtcccacttgatcattgtgtatctttttgacatgctattggatttggtttgctagtattttgttgaggatttttgcatctgcgtttatcagggatcttggcctgtagttttctctttcttctgtctttgcctggttttagtatgaggatggtgctggcctcacagaatcagtttggaaaaattccttccccttcaatttttttggattagtttgagaaatattagaatttgttctcccttaaaagtttggtagaatcaaatccaagaaggggatgatgagaacctctaattttcaggcaaactgggcagttgttggtaatcaggtgacctagtagttgtcattggcatctgaagaggtgggcagtcttgtgggactgagcaattaaactgtaaggtctgtgctaactcaggttagtgtcagaattgaattcaattgtaggacacccatgtagggagggctggagaagtggtgtcagaaaaactccacatattttgtgttaaaaacgaaacattctggaagtattgagtgttgtgagagtatatatttttaaaaccagtttgtttttcctatgcaactgtataaaaagacatatcaagtctcactccccccaccaccccaatcactataggttatcactataggtattgtttctggttcacgtttccaatacttcttttttcctatcttttctttttttagtgaatataaacaaatgcttatatctaatctaatttccttttcttttttagacgaactatatgttacactgttctatactttccattttttatatattccagagttaatgtcattccgtagagagcttcgtttttttttttttctgctgtgtgtgtatgggctgcataaaactttatgatgtgactgtggtgatttgagctgctacctttatcaaatactaagcatctatgtggatgttaatttcttttttttttgagatgaagtctcactctgtcaccaggctgtagcgcagtggcacaatctcagctcactgcaacctctgcctcccaggttcaagcgattctcctgcctcagcctcccgagtagctgggactacaggcgcgtgccaccacacccagctaatttttgtatttttagtagagacggggtttcatcatgttggccaggatggtctcgatctcttcacctcatgattcacccgccttggcctcccaaagtgctgggattacaggtgtgagccaccgtgcctggccgggatgttaatttctttctttctttctttttttgagacggagttttgctcctgttgcccaggctggagtgcagtggcttaatctcggctcactgcaacctccgcctcccaggttcaagcaattctcctgcctcagcctcctgagtagctgggatgacaggcgcatgccaccatgcccagcttattttttgtatttttagtagagatggggtttcatcatgttggccaggctggtctcgaactcctgacctcaggtgatccacccacctcggccacccaaagggctgggcgtgagccaccgcgcccggccatggatgtttatttctccatttcccatcctcctccctttgtctgtctctctaaccacacacaaatagcacactgttttaagtatagaggctttatcatgtacctcatataacttcatgtaacttcaattctactttctgtctctatgaatacacctattctaggcacctcatataagtggattcatacaatatttgtccttttggtctggcttatctcactccgcatagtgttgaaaaagaaaataaatggcttttatctgaggaatgcaagccttctttatgtgatcaagcccagagaggggttgggatgacacagctgttgtggtggctcatgcctgtaatcccagcactttgggaggcctcggtgggaggattacttgaggcccggagtttgaaactagactgggcaacataactaaaccctctctctataaatttttttttcaattagccaggtgtggtggtgtacaccaatagtcccagctactcagaaggcctaggcggaaggatgcttaagtccaggagtatgaggctgcagtgagctgtgatcatacctctgcattccagcctgggagacagagcaagaccttgtctctaaaaaaaaaaaaaaaaaaaaaaaatgctgggtgcagtggctcacacctgtaatcccagtacttcgggaggccaaggcaggcagatcacttgaggtcaggagttcaagaccagcctagccaacatgatgaaaccctgtctctacttaaaaaaaaaaaaaaaaaaaaaaaaaaaaaggaaagaaaaattagccgggcatggtggtgggtgcctgtaatctcagctactagggaggctgaggcaggagaatcacttgaacccaggaggcagacgttgcagtgagccgagatcccaccactgcactccagcttgggcaacagagggagaccccatctcaaaataaataaataaaaattaaaaaaataaattaaaaattaaaaaaaagaaatgagttttttctgctctaaaatcaaaagtttgcaagctgcattcctttctggaggctctggagaatttgttttttttcattttccaagttggagaagctgcctgcattcctcagctcatgggctcctttcatctttacacccaataatggctggtcgtgtgtttctcacagcacacaattccaacactgactttatgccttcttcctcatttcagaccccatgtgattacattgggtctaactggacaatccagtataattcccctatgttaaggtcagccgattagcaactttaattctacctgttaatttaattccacttgccatgtaacatagcatattcacaagtcccaggaactagcatgtgggtattttggggggaacattatcctgcctactttagatgttgaggtcattcaagaggaaaatgatagttttgttaacatgtgatgttagaacaactgaatttccatctggaaaataataactttgaacattacctcacatacacaaaaactaacttcaagtggatgatagaccaaaaataaaaactaaaactatacaacctttagaataaaacataggagaaattcttcacaacactagaggagtcaaagattgttagaaagaccagaaagcatgaagcacattttaaagatgagaaattggatttcatcagaagtaaaaactgctttttgaaagacatcatgaagaaactgagggctgggcacagtgactcacacctgtaataacacagtgagaccccatctccacaaaacacaagaaaattagttgggggtggtggtgcacacctgcagtcccagctactcaggaggatcgactaaacccaggaggtcaaggctgtggtgagctatgttaacaccactgcactccagactaggcaacagagcaagaccctgtctcaaaaaaaaaaaaaaaaaaaaactgagaaggtaagccccaggcagggagagaatatttgcaatttgcaatatgtatatttggcaaaggacttttacccaaacatataaagaattgttacaactcaataataaccaattttaaaataagaaaattttatttatttatttatttattattattttttgagatgcagttttgctcttgttgccctagctggagtgcaacagtgtgatctcagctcacagcaacctctgcctcccgggttcaagtgattctcctgcagggattacaggcatgcaccgccacgcctggccaatttcgtatttttagtagagacggtgtttctccacgttggtcagggtggtctcgaactcccaacctcaggtgatctgcccgcctcagcctcccaaagtgctaggattacaggcgtgagccactgcgcccagccgaatattttcaatagatgtcacaaaagaagataaaagaatggcaaataagtatatgaaagtatgctaagttcattgacatcaggaaatgcaaattaaaaacataatttgatactactgctcattccttagaatagtcaatagatgcctgatgtggggtttgggaggtggggattgacttaacaatgtggggggcagagggcggtgaataaaaatattctatatccgccgggcgcggtggctcacgcttgtaatctcagcactttgggaggccgaggcgagcggatcacgaagtcagaagttcgaggtcgggagttcgagaccagcctgtgagctcgaaccctgtctctactaaaaatacaaaaattagccaggcatggtggcgggcacctgtaataccagctactcggaaggctgaggcaggagaatcgcttgaacccgggaggcggaacttgcagtgagccgagatctcgccactgcagtccagcctgggtgacagctagactccaactcaaaaaaaaaaaaaaaaaaattctatatccagtaacactaaggataaatgcttgaggggatagacaccctattttacatgatatgattcttacgcattgcatgcctgtatcaaaacatctcatgtaccccatatacaactactatgtacccacaaaaatttaactaaaatgcttaaaaattttttaattttaaaaaatattctatatcctgattacgatggtggtgacaagggtttagacatgcgttgaagcttaccgaacagttcacttaaaatgagtgcattttattgtatctaaattattcttcagtaaagttgatttttaaaaaacatgcacacaaatataatttacaaactataacattagctcgtttatggtgtaccattcagtcacttttagtgtattcagagttgtgcaaacatcattatctaattcaagaagctttgcattaccccaaaaatgaaccctttagctattaccaatcactcacagttccccctaatcctgctagtcctaaaaaactctaacttactccttttccgtagatttgactattttaaatatttcctataaatgcagtcatacagtatgtggcttatccacggatgaaggcaaaaatgacgatttagtcagtctagcattctcagagagcgttataacgcctagtacagtccggggtcctgggtgcgttctgcactgagtcggcttggggcaggaagtcatttaagcgacctccttccacttgccccagcgcctcaccccttcctgctctagactacagttcccaaaaatccttgcggctctagtcaacatctggcccgaagctggcgaccttttcctgtttctcagggaactccctggggttggccggtaccatggaggaagattgtcttcagcgtgcagggccagcgtcctacggcagtttcactctgagcctgtgtctggatcacggagacgcggggtagcggttcggagtgcggagcagggatgtccccgagctgtgcagctgcaagaacccgaaaaaacaggcgccatcttctcggcgcggtcctactccggactgtatttcccagaggcccccgcgagtccagggcagccccttcatttgcctgctggaccctccgcctcaagggtaggggaagtgcgcggtgagcggcctgggtcttgcaggctcggctggggcccgcaggtacgtgcatgggagtttgaagggactgaccaggctggtctggagtgttgggcatgtatgagtgtgtcgggcatgtatgagttggtcgggctgatagagggggtggtggggaggcgggcgcgaggcgtgggcttccgtgtgtgagtgtgaccttatgtgactgtgcctctctgtgtgcgcgggtgtgattgtatatcctcgttgtagttgtgtaattgtaacaatgtaaggctgtatgtgtaggtatgactgtgtcccgtgttgggactgtgattgtgtgtggctgtgtaactttgcgtgacatttgtggagggtgtttgtgtggagagaatctgatgaggctgtgactgtgtgttagtctgaggggtgtgtgtaattgtgtttgtatgactgttagcagcacttaagtgtactggatgccttactgagtaaatctactacccagaaataacccagtaacgtgagaatgtgagagtgtgaccatgtaactttatgtagcactgtgtctgcggttggaaagtgcgtgtaatcgtgccggggtgatatgtgtgtcctagtggtcattgtgttattttgaatgtgtgattgtgtgtagtgctcaataggggtcctggggaggggggaactgtaactttgtgtggctcagtagtgcgtgtggtattgtgactatctgtagcactctggttctgaatggtgctatgtttgaggggtctgtaaatatgctagtgtaacttatcctcaaggtagatgtgggacaatgattgtgtgaccatatatagtgttattgtttgggtgaggcgtgcctgtggaggtctatgtgggtccccatggtggctgggtgactgcagcattgggtagggggtgcttgtgactgtctttgtgactccagctctccctgtgaggtcaggacagattctcgagaggagagacctcacccctctgataccaagaatgctcatgacagcctacacttctctgtttttgttttgttttgttttaaggcggagtttcgctgttgttgcccaggctggagtgcaatggcgcaatctcggctcaccgcaacctccgcctccccggttcaagcaattctcctgcctcagccttcctagtagctgggattacaggcgtgtgtcaccacgccctgctaattttgtattttcagtagagacggggtttctccgtgttggtcaggctggtctcgacctccccacctcaggtgatccgcctgccttggcctcctaaagtgctgggattacaggcgtgagccaccacgccgggccgcctacacttctctgacctcccccatcccttcttctctccatagatagtagctgtagatccaaaatgacctctgatctgctcagtctgggccacaagaaaggcctggcatctcatcattcctttcttcttcagctctgctctcgtcaagagagttacccagaggaagaatggctgttgaccaaaccaaatacaaggtgcattgggtttcctttttgcttctcttctctggatagtcgtggttaacatagagtcaacaagtgacctggttcttacaagtttctattcaagaaaatgatgagaagccttggagtggactcagagatcccagtagtctgttacttctttctacaaaatgttcacttattaatttagaaaatagaacagttttcccagtgtactaaagttttgtttttttaaacacacacacactctcccctcctctgtctcacacacacccacccacacaattccaaagaatttagaaaatagggagttacaaacagcaaatctactacccagaaataacccagtaatattttgatctatttccttctagtaagtttcctatgcacatatacattgttttcaagattggaatcttatgacatttaccatttcatatcttgtattttcactaaaaattatgtatggttcttatatttggttttcttttcttttctttttttttcttgagacggagtctcgctctgttgcccaggctggagtgcagaggcgcgttctcagcgcacccaggctggagtgcaatggctagatctcagctcactgcaacctcccgcctcccgagttcaagcaattctcccgctccagcctcctgagtagctgtgattacaggcacctgccatcatgcctggctaatttttatatttttgtagagatggagtttcactatgttggccaggctgttcttgaactcctgacctcaggtgaggcctcccaaagtgctgggtttacaggtgtgagccactgctcctggcctatatttgtttttttttttgttgttgtttaatccctttatattacgtaatacagaaaaatagttaaaatatagatgtatagtttaagaagtaattataaagagaccctcagcataacaaaaacttgcttcagcagtccagaaaagcccgctagtcctttccccagaataaacttatcctacctccctctttaggcaacacttatcctgactttgataatcgttattttcttcttgactttttaaaaaaagttttgttttgttttgttttttaccacatatctgcttatccctaaacaatatagtttagttttgcctttttaacactatataaattaaattgtactgtatgatgttgttttgagtcttgcctttcttataaaatactatatttgttagcctcactctcgctgctatacatagctgcagttcagacgttggttatttcctgtatgacagggctgctgtgaaaatgtttttacaagtataccagcatatatgcatacctttccaggatataagtgtatgaaggaattgctgggccatacagtatgttttgcatctttaaatttcctagataatgctgaactgatctacaatatagttttataaattaaattcctaccgacagcttataaacattatagtcatcttgtattctaacacatggtcatttggtattctaatctttaatgaatctgctgataccatgatatatcatgttgttttaaaagtataacatacattctggggccaggcatggtgactcatgcctgtaatcccagcactttgggaggcctactgggcagattgcttgagcccaggagtttgagacaagcctgggcaagatggtgaaaccccatctctacaaaaagtacaaaaattaaccaggcatggttacatgctgctattgtcccaggtattcaggggataaggtgggaggattgtttgaacctagggaggttgaggctgcagtgagctgcgattgcaccactgccttccatcctgggcaacagggcaagaccctgtctcaaatatatatatataccatacattctgaaaagtacaaaatcaaggtatatgacctgatgacttgtataaaagtgagcatattccgggctgggcgcggtggctcgtgcctgtaatcccagcactttgggaggccaaggcaggcagatcatgaggtcaggagatcaagaccatctggctacggtgaaaccccgtctctacttaaaaaaaaaaaaaaaatacaaaaaattagccgggcatggtggcggccgcctatagtcccagctacttgggaagctgaggcgggagaattgtgtgaacccgggaggtggagcttgcaatgagccaagattgtgccaccgcactccagcctggccgacagagcgagactctgtctcaaaaaaaaaaaaaaaaaagaaaaagcatattcctttgaccagatctcaaatctgataaggaaataaaacataactggcattacagaagcccaagtcttgtccagttcactcactacccacttctcctaaagagaactaatagtttgtcttctatagccatagactaattttacctatacttgaattttgcttggcttctttttttttcactttttttttcctactgtcagtttcacttggagatgatgcttggcttcttttgctcaatattgtatttcgtatgtaatatgaatgtattctgtaataatatgtagtataaatatataaaattcatccatgttgctgcacgttagttataggtgatataatgaatatagtgaacacattattattgctgtttaaaattctgttgtatgaatataacacttttttttgtttttgagacagtttcgctcttgttgcccaaggtggagtacaatggcaccatctctgctcaccacaacctccacctcctgggttcaagcgattctcctgcctcagcctctcaagtagctgagattacaggcgcacgccaccacacccagctaattttttgtatttttaatacaaacggggtttcaccatgttagccaggctggtctcaaactcctgacctcaggtgatccgcccgcctcggcctcccaaagtggtgggattacaggtgtgagccaccgtgcccggccgaatataacacattttacttatccattccattactgattggcatttgatttcatattgaggctgttatgaaaaacgctgccgggaacattcttttacatgtcttttggtgcacatatgaatgcatttgtcttgggtgtatttctaggagtgaaattgctgggtcatggtttctgtatatgttcagctctaatagatactgacagttttctgaaatagtggtatcaatctatattccaaactgcagtgtagactttatgacaagaatagattttacaacaagaagctttactagagataaagaggaatagtttataataaaaagatcaattcaccagtaagatataacagttctgaatttatatgccttcataaaatggcttcaaatatatttgacataactaaaagaagtagtagataaatcacaatcttagtggggagtttttagcactcttctcaatagctgacagaacaagtgacaaacccaataaagctatatggtatttgaacagtgtgattgacaagcttgacctgattgatatgtatagaacagtgtaccttacaactacataatatacttgcttttcaaatgcatatgagacatttatccaaattgatcatatgctgggccacaaagggagtctcaataaatttcaaaggaatgaaataatactgtaactttcctgaccacagtaggttaagctagaagtcaataacaagaagataattggaaatatcccagccaggtgtggtgactcatgcctgtaatcccagcactttaggaaaccgaggcaggaggattgcttgaacccagaagttttaggccaccctgggcaatatagcaagaccccatttctaaatttaaaaaaacaaaaattaaagaaatatcccaatgtttgggatttaagcaatgtatttataaataactggtgactcaaagaataaattgtgatagatatttaaaatattttaaactgagtgataatgaaaaataacataccaaaattatgtttctaaagctgaatatgaggaaaatatatagctgtaaatgcatatgttagaaaaaaatgaatgttggccgggcgcagtggctcacacctgtaatcccagcactttgggaggcccaggctggtggatcacgaggtcaggagttcaagactagcctggccaagatggtgaaaccccatctctactaaaaatacaaaaaaaagtagccaggtatggtggcgggcacctgtaatctcagctactcaggaggctgaggcagagagttgcttgaacctgggaggcagaggttgcagtgagccaagatcgcgccactgcactccagcctgggcggcagagtgaggctccatctcagaaaaaaaaaagaaaaaaattaatgttgaaaaattaatgatctatgtattcatctcaagaagctaaggaaaagtctagaaagttaaacccccaaaattaaaatctaggaaataataagaataaaagcccaaatataaaatttttagtttatttggtattgcatatatttaaggtgtacgtgttttgctgtacataacgaacatatattgaaatacaaaatgaatgtacagtgaagaaaactaacaaaggcaaaagcttatttttgggaattaataaaattaataaatctctaacaaaacttaaaatatgaagtaacacaaaaattgccaatatctgataagaggaaaattaaaccaaccacagacttaacttaaaggctgagggctcaattaattaattagtgtttggtacctgggacttggttccacaaaataagctcattggaatctgagccactgatcattatactgggtccctttttatacttcattgaacatgtagatttttctggttttttgtttttttctttttttgagagacgggcctctcactctgtcacccaggctggagtgcagtggtgcagtcacagctcactgcaaactcgaccttccaggctcaggtgattgtcccatcacagcctcccgggtagctgggactacagacaatgtgccaccatgcccagctagcttttttttttttttcaatgattttgttttcattttaattgtggtataaaagacaatgtaaaatttaccatcttaatctttgtttttttttttttagacggagtctcactctgttgcccaagctggagtgcagtggcatgatctcagctcactgcagcctctgctttccgggttcaagcgattctcttgcctcagcctcctgagtagctgggattacaggtgggtgccaccatgcctggctaatttttgtgtttttagtagagacggggtttcaccatattggtgaggctggtcttgaactcttgacctcgtgatcacctgccttggcctcccaaagtggtgggattacaggcatgagccactacgcctggccatcttaataattttttttttgagatgagttttgatcttgttgcccaggctgaagtgcaatggtgcgatcttggctcactgcaacctctgcctcccaggttcaagtgatctcctgcctcagcctcccgagtagctgggaatacaggcatgtgccaccaagcccaggtaattttgtatttttagtagagacagggtttctccatgttggtcaggctggtcccgaactcccgacctcaggtgatccacctgccttggcctcccaaagtgctgggattacaggtgtgaaccaccacaccaagctaatcatttttaaatgtacattccagtgttaagtatattcatattgtacaatagatctttagaactttttcatcttgcaaactgaattataactattaagctacaatgtcccatttccctctttccccagcccctggcagccactgttctactttctgtttctatgagtttgactaccttagatacctctgtaagtggaatcatttataatagtatttgtctttttgtgactggcttctttccagtcacaataccccaagatagaaaggggattcactgcagttagtcagtagacacacacaaacccaagtagtaacgggatacaatataataatgaattagttgaatgctttgataaattagtttgacatgttactttttattatcattcagtttaaattttttttttttttttgagaaggagtctcgctcttgtcaccaggctggagtgcaatggtgcgatctcaggtcactgcaacctccgcctcctgggttcaagcgattcccctgtctcagcctcccaagtagctgggactacaggcgcgcaccaccatgtctaactaacttttttttttttttttgtattttagtagagacggggtttcaccatgttgcccaggatggtctcgatctcctgacctcgtaaaatatttttaacttccattgcaatttattctttgaaccaccagttatttataaatacattgcttgaatccctgacttagcataatgtcctcagggttcaaacatgtagcatgtgacaggacttacttttttgtagttgtttatttgttttaatatgctttattttttagggtacttttaggttcacagtaaaattgagcagaaggtacagagatttcccatacacgtctttcccccacacgtatggtctcccccatcatcaacatcctccaccagagtggtacatttattacaactaatgaacccacatggacactcagagtctatagtttacattagggttcactcctggtgttacacatccaggggtttggacaaatgtgtaatgacatttatctccattatgatgtcatccacattaattccattgctctaaaaggcctctgtgccctgactgatcctccctccctgtcaactcctaatctttttattgtctccatagttttgccttttccagaatgttgtaatcatacagtatgtagtctttttgaattggcttctttcacttagcaatgtgcatttaagtttcctaagctgttgatcatgagactgagtccctttttatacttcaacagacatgtaagtttctatttttaatatagattttaatttttgtaagttcatttattggacaagatgtgtgctttaaatttttgcatggtgaaatctgcagtttcactataagatatattgacctggggtagtcgtatttttaaaatttatttatttattctttttttgagatgtagtcttgctctgttgccaggctagaatgcagtggtacgatctcagctcactgcaacctccgcctcctggtcctcctgcctcagcctcccaagtagctgcgactacaggcgtgcgtcaccatgcccagctaatttttgtatttttagtaaagacagaatttcaccatgttggccaggatggtcttgatctgttgacctcgtgatctgcccgcctcggcctcccaaagtgctgggattacaggcatgagccactgcacccagccaggctttttttttttttttttttttgagacagagcttcgctcttgttgcccaggctggagtgcaatggcgcaatctcggctcaccgcaacctccgcctcccaggttcaaacgattatcctgcctcagcctccctagtagctgggattacaggcatgtaccaccacgcccggctaattttgtatttttagtagagacggggtttctctgtgttggtcgggctggtcttgaactcccgacctcgggtgatcagcctgcctcggcctcccaaagtgctgggattacaggcatgagccaccgcgcccagccatccggccaggcattttttaaaaaacttaaatctcccttgttaatatcactatataattattaggggtttaatattgctaatagaatgtttacttcctaggcgataccagccctgcagggcctgtgggattttctctttgtgtgtggagacgagagattgtagaaataaagacccaagacagagatagaagaaaagacagctgggcctgagggaccactatcaccaagacacagagaccggtattggccccgaatgcctggtcgcgctgttatttattgtgtataaggcaaaggggcagggtatggagtgagagtcatctccagtgatcggtaaggtcgcgtgagtcacgtgtccaccagacagggggcccttccctatttggtagccgaggcagagagagagaggggacagtttacgtcataattttttaaatgtattttaaagactttagttttgttactgtcaaacaaaatttgtaactaattttgttactgttatttagaaggcagagccaggtgtacagggcggaacatgaaagcggaccaggagcgtgaccgctgaagcacagcatcacaggaagacaggcctctggatggctgtgggcgggcctgactaacgtcaggcgtttttacaagagatggtggagcagagtgttttttaactcccccagggaaagggagactccttttcccggtctgttaagtaacgggtgccttcccagttactggcgctaccgctagaccaaggtcggctaagtaacaggtgccttcccaggtactggcgttaccggtagaccaaggagccctctagtggcccagtctgggcataacagagggctcgcatttttgttttttggtcactttttatcgtgtccctttagtttttatctctgtactgtgttcctttagtttctatctctgtatggcttgggtttttttaggttataattgtagaacaaagattattattggaataaagagtaatgctacaaactaatgattaatatttatatataattataatttatttttagtataactatttttattctatatattttctttattatactaaaacagcttgtgcccttggtctcttcccttaacacctgggtggcttgccgcccagagtatgcaataagctctcatttggaacattcagctaatttgttattttattgtatcccatttctacttggttttgtgtgtgtctactaactgcagtgaatccccttttcatcttgggatattgtgtgaggccactgttgtgatgggtccttctggctttggtacagtttttcctttttctgggactaactggctttttcaaagttcccgagtttattctttttgtcttgggtagatggaaacaagccactaatactagaactataaaaaacaggataagaaaagaacacatatataatccttctctaattattgtatgtaaaaaaaaattattttattcgcccaccttttttgtgcactttataacaatttttttcttacatattattatggacttagagcatttcatagctatttcaactgactgatagctgttaaagactctatcacagtgtggaggagtggcagaagtattctgtttattgttgtgtaagttttcattagttggctaatgggatccccttttaggagactcttaaaaggagttctttcagcacagatatttttaaaaacagcctcaccttttggcaatggcaaaaggttgaattttttttttttttttttttttttgagacagagttttgctcttgttgcccaggctggagtgcaatggcgtgatctcggctcattgcagtctccacctcctgggttcaagtgattcttctgcctcagcctcccgagtagctaagattacgggcatgtgtcaccatgcatggctaattttgtattttttttttttagtagagacggtttctccatgttgatcaggctggtctcgaactcccgacctcaggtggtctacttgcctcagcctcccaaactgctgagattacaggctgtgagccactgcacccagcttttttttttttttttttgagtcagagtctcaccctgtcacccaggttggagtgcgatggcacaatctcagctcactgcaacctctgcctcccaggttcaagggatttttgtgcctcagcctcccaagtagctgggattacaagcatatatatatatgtgtgtgtgtgtgtgtgtatatatatatatatgtatatatatgtgtgtatatatatgtatgtatatgtgtgtgtatatatatgtatatatatatgtgtgtgtatatatatgtatatatatgtgtgtgtatatatgtatatatgtgtgtatatatgtatatatatgtgtgtgtatatatatatatatatttttttttttttttcaataaaacagagctagaagaattagtgcctgcatccctgtgtgtttaggggtggatgcgggtgttgtgtgtgtgcatgtggtgagtgaagttgactttttgagggttgagaaacaaaaagacttgattagggaagtctttggtctttctgatctgagtgcactgtgttcctggccaaagggcaccatttgtgtgagtctggtttggggacctgagggctgcaaaggaggtcatggtagctcagtcttgggtcatagtaggtcattagctcagggcagaccataatagctcaatcatgggttcagagcaacatcactgaggtgggacaaggtctggcccgaatccgttggctaaggcaggaacttaggttgtttgcatgagggagaatgaatctgagtccttgtcttgctgcagctaaagcctgaggtttgtaggattgaggaaggagtaggatttgttccatattcctactaactggagttgtatctcaagaccaagaaatatggaggtggttttatctgacctctagtgtgatttctagagggttttacttccccagtcatgcaacctcagaacactgtcctttttcaggagaacggcctcaaggaagactaaccatctgcaatactagaagccatggctgaggtgagttgatgctttttcttgccttcctgacatttagtttaaaaaaaaaaaaaagacatgagcatttgctttccttatcctgacatttctggctaacagagttccccttcagaatccttgtccccattttttcttagctagataatcctataccatctctaagtatcccttttatttttataaatcaaccagcattaatattttcattccgtaaatacctgagcatctctttttctgaactctttcccaaggactatgataggggatgaattatctcaaggaagcaagaatagatttgtaaaatgaagttaccctgtctggaccattatttgatgagttgaaggtgtgagttacttagctggaaatatagacaagccaagattatctctacagagtagcattctccagtaagataggatgaagtgtggtgctggtagttccaaatgttggattgttgcaagatctggtttaggcacctttggggatcatggggttggtggctgatacagagctctgcaactctgtaagaacatcctggagagaagtccaatttcaggttggataggaagtttggattgtaaggaatttctgtgaatcattgagttttctgtatctcagaattaaggatagtgataatggatgtttacaatggttcagccaatgcataagtcatgtggatcacactgtcagagctcagaagaaccttttaagtcttatccagtaatatctgtattgtagaaaattctaccagaaaaataattattaaagaatttgtaaaacgccaggtgcagtggctcatgcctgtaatctcagcactttgggaagcagaggcaggcggatcacctgaggtcaggagttagagactgggctggccaacatggtgaaaccccatctctactaaaaatacagaaaattagccaggtgtggtggcacattcctgtagtcccagctacttgggaggctgaggcaggagaatccttgaacctgggaggcagaaattgcagtgagccaagatcacaccactgtactccagcctgagcaacatctcaaaaaaataaaaataaataaaataactttacatataactttatatatctttttcgtagctttgattgatgctctaagatcacatgggggtagtttagaatatattagatgaaggacagctttggacataacacagaccaagagttgagaacttttgcatcaggcacaagcaaactgattatagttgtgttataccagatcatgtagctgctgtgtaacgtgaccttaaatagtcttcctgcataggacgagcaaaaggggatgattcatcaataggatagagatttaagacattctctggctaccccttgcattgttaggtgatgtcttttagcagaattatgaagacctttttctcccttaataaaggagaaaaactgatggcctgagaaatctttctctgcttttcaattttatgaattttttcagaagttataagactattactgaatttttacttatttgataaacattaactatttttgttttggtcagataaattattgacaaaactaattagtatttttttataagtaaaacattttccttttttcctcaaaaaggtttttttgttttttttttttgagacggagtctcactctgtcgcctaggctagagtgcagtggcacgatctcggctcactgcaacctccgcctcccaggttcaagcaattctctgcctcagcctctcgagtagctgtgaccacaggcccctgccaccacgcctggctaattttttcggttttagtagagactgggtttcatcatgttggccagactggtcttgaactcctgacctcgggatccacccaccttcgcaaagtgctgggattacaggtgtgagccaccatgcccggccaaaaatgtttttttcacgtaggtctatatagctaactggtagaccagagaattacctcatcttattttggttttataccaataaaatatatcttggatactcaataaataaatactcaaaaaataaaaaaataaggtcatgatgcataattttattaggatgcacatcgtatctggttctctttctttttgtaatattaccagttattgataatttttagattcattcactaggggttacaagtgatcttttaattctgtcattcttccttcatagattaagtggaatacgtctatctataaagtaaaactttccctcatcaattgtttggttaccctgaaggacagttcatataggaaagaagaatgtttgattctttccatttaattaccagttttccaaataatgagttggcttcttagacttgtccaaaagtgaccaataatgttttaaaatagtgttgtgaactcatggattaaacatttttaatatgatcagtccgttgcagttgtccatataatttgatgtgcaaccaatcctagtgaacacgtattattctcttttataatgctattgtattatattctcttattttttttttaatcctcttgatttctctgcagaaaatagggaaattcatcaaacacaatggaaagtttccttggaagattattatctagtcacacttgcatacagtcccctcttacagcattctacagtttgggattttgtttgtttgtttatttgtttttgtatttatttatttatttatttatttattgagatggagtcttgctctgtcgcccaggctggagtgcagtggtgatatctcagctcactgcaagctccgcctcctgggttcaagtgattctcctgcttcagcctcccgagcagctgggattacaggcgcgtgccaccacgcccagctaatttttttgtatttttagtagagacagggtttcactgtgttagccaggatggtcttgatctcctgacctcatgatctgcctgccttggcctcccaaagttctgggattacaggcgtgagccactgcgcccggctgtttttattttttttttgggatggagtcttgctctcttgcccaggctggagtgcagtggtgccatcttggctcactgcaacctccgcctcccaggttcaagcgattctgctgtctcagactcccgagtagctgggactacaggcgcacaccaccacaactggctaatttttgtatttttagtagagacagggtttcaccatgatggtcaaactggtcttgaactcctgacctcgtgatccgcccgcctcagcctcccaaagtgctgggattaccagtgtgagccaccacaccgggcctgggatttgtttttaatcctatgggaaatgtcctaatagggctttggcatatctttgttccaatttctacattgaggaggggaagaagctttctttttattaaataaaatacacatctttttatttttttaaaattttatttatttattttttcgagacggagtttcgcttttatcgcccaggctggagtgcaatggcgcaatctctgctcactgcaacctccacctcccaggttcaagcgattctcctgcctcagcctcccaagtagctgggattacaggcatgtgtcaccacgcccagctaattttgtatttttagtaaagacggggtttctccatgttggtcaggctggtcttgaactcctgacctcagatgatccacccacctcggcctcccaaagtgctgggattagaggcatcagccaccacgcacggcccacatctattttattaaataggtgcctcaagcattagttgctaatgaaacagaaatacaaatgaaacatctaaatatccaaataccacattttctctagatttcccccaaaatgtgcctcatctccctgtacttttacataatatttctagtatcttcattttgttagttttgcaatgtcactgtcaagatagaattatttgatggcttaagacaacttttattttattttattttattttttgagacagagtcttgctctgttgcccaggctggagtgcagtggcgcgatctcggctcagtgcaagctccgcctcccggattcacgccactctcctgcctcagcctcctgagtagctgaggactacaggcgcccgccaccacgcctggctaatttttttgtatttttagtagagacagggtttcaccgtgttagccaggatggtctcgatctcctgacctcgcgatcagcccgccttggcctcccaaaatgctgggattacaggcatgagccaccacgcccagccaacttttgtaagattttcaaactctaaatttataaatcctattacaaaaaaaaattataataatttgacgtgcaagttgtaacagtattggtcagtgggagtatcttcaagttgcctcctagtcttatcagcatgatcctaacagtttttggttgctttcttgctttttggtataacaagacgttcagactcatcctgtgcattttgtaaaagttgctcttgtggatttcgtgaaatcagttcttttcccaaagaaccttggtttcttttatttgaaaatgatatttagaaaccacaatctaggctgggtacagtggctcatgtcgtaatcccagcactttgagaggctgaggcgggcagatcacctgaggtcaggagttcgagaccagcctggccaacatggtgaaaccctgtctctacttaaaatacaaaaattagctaggtgtggtggtgcgtgcctgtaatccccgctactcgggaggctgaggcaggagaattgcttgaacccaggaggcggaggttgcggtgagccgacatcatgccactgcactctagtctgggtgacaaaagcgaatttctgtctcaaaaaaaaaaaaaaagaaaagaaatcacaatctagactctagggatgctcgttgctactggattagtcattatttctaggccgtttcaatggacagagtcaggaatttgtttaatataaacttcctactcttgcatctatttctgaaatctaaagatacaggttctcagtgacaccaatataatgactcattttgtattaccccacaatacaagcatcgtagtctctgatacatttttttaattacacaagtaatacgtatgtttattgtttcagggatcagtgatgttcagtgatgtgtccatagacttctctcaggaggagtgggactgcctggaccctgttcagagggacttatacagagatgtgatgttggagaactacggcaatctggtttcaatgggtaagggcatctgtaccagtgattcccagttctcctctggaatgtctccttcttccacagtgaatttctcagctgcttttcaggttactagctgaatttctattctttattaccaaacaaatggtttgagctgaaatgaaaaggaagagtgggaaattggcaactccagtgggctgtggttgaagcttcatcttcatctttctttggctgttcctgtagtggcatctcttcctgtgatcatcaagggactggatctcctttacccccagcataaccatgttccatatcttttctcgtgagcaggactttacactcctaagcctcaagtgatctccttattggaacaagggaaagagccctggatggttggcagagagcttacaagaggcctgtgttcaggtaagtgagaaatgaccggacaggagaaagtcacgataggtcagaactcagctggtcagggaggaaacagcacctttgagatgttatccctgaagctcccatcaagaaactaggccagtggagaaaatgaagtccttttagcatagttgttaaataacctgtttcgcccttttcctcacttaccactatttctactactcctctccaatcctcctcttaatttcaagcagaaggtaccttttacttctctaaaaaaaaccctattttacccgtattttagattcagctgcttgctagctttttttactctctctctttttttttctttttttttaaagggtctggctctgtcacccaggctagagtgcagtgacatgatcataacttattgtaggctcaaacttctgggcttaggcagtctccctgcctcagccttccaagtggctgggaccgtaggcctgtgccaccatgcctggctaattctttttcttcttctgcatttttttttttttttgagacggagtctcgctccgtcgctcaggctggagtgcagggtgcgatcttggttcactgcaacctctgcctcccgggttcaggcgattcttctgcctcagcctcctgagtagctgggactacaggcgcatgccaccatgcccagctaatttttgtatttttagtagaggtggggtttcaccatattggccaggctgttcttgaactcctgacctcatgatctacccgcctcagcctcccaaagtgctgggattacaggcatgagccaccgcgtccggcccctcttctgcattttttagacttgtacaggtgttttctactaccactccccaaaataatataattgcgtctgtatacacacatgtgaacacacacacacacacacacacacacacacacacacacacagagacacacacacacacaccccttgcccaagtactggtcttcattatagctgcctgtcagtgacctgttttatcagactgtcttcaatgtttcctttatggaacgttttttaatttcctggtttgtgtaagggaatcttccaggtgctacagtttactaattgtgttacctttacaaattcaaggtccaaaagtggtgctaaaatatatacatatatgacttccacaaagtagagtagtataaaagagaaatgagataaggagtttagcagaaagtcaaaggctaactatgtagaagtggaattaatccctattgaagtagtaggtggagccttggaagtgactgcaatcactatgtatagagatattgttggggccaagaaaaaaaaaggatctgtgcctatattaaaaaggaagaggtggcagagcaggagagatttgggatgaagtaggagaaccagaagagtacttattgagcactactatgtaccaagcattggtccaagggctgggactgtagtattcatgaaggcattctaaagttctgcacttctgaagcctacattctagagggtaagagagaaaatgtcttagtccattttgtgctgttacagcagaatacctcacatcgagtaatttataaagaacagacatttattttctcatagatctggaggctaagaattctaagatcaaggcactgtcatctgatgagggccttcttgcatcttcgtgtggcagaaggcagtagggcaagagagccaactccttccatcaagccccttcgtaagagcaccgaaacccatccttgagggatgggtccttgaagcccgatcatctcttaaaggcctcacctcttcgtttttggaattttttttttttttttgagacagggtctcactctgtcacccaggctggagtgcagcggcacaatcatggctcaccacagcctcaacctcccgggctcaggtgatcctcccacctcagcctcccgagtagctcggcccacaggcacacgtcaccacgcccagctaatttttctattttttgtagagacagggtttcgccatgttgcccaggctggtctctaactcctgggttcaagcgatccacccaccttggcctcccaaagtgctaggattaaaggcttgagccactgtgtctggcccccacctcttaatactatcacattggcaacagctgaattttgaaggagagacattcaaaccatagcagaagataaacatgaatgtcaagtatatatgtataaaacaatattagcatgacattaatattatatgatatataaatatttttagaattatatatcacttacatttatctacatgtaactaatatattggtatagtataaatatatatcatatattaataatatttctatattattatatgtccatgtgtatatgaaatgtcaggtggtgggtgatagataagtgctgtgaagagaggctagagagggcctctctgatgaggtgttcttttagtgaagacttgaaggaagtgagggaacaggtaatgtaaatatctgctaggagagattcaggcaaagggaacaggaagagccaagtactcgagttcagagctttttggcagccaccattatggctgaaattgaatgagcaaagcgggaattgtagaagaggagatcaggaaagtagcaggcttatgagtgtttgcatgctgggtgcaggtcaggatgggagttggatgtacctgtagatgattttgggtcttgtggaccttgaattttactccgaatgaggtgtaaatccattgaatgatttagcagagtgatattatcatgtttgcaaaggatcattcttgctctaggggttcctaactttggattcctttaggtagaattcagggagtccatgaacttggatgagaagaaaaaaatacatctttttggttttttttgagacggagtctcactctgtcacccaggcttgagtgcagtggtgtgatctcagctcactgtagcctccaccccgcaggttcaagcgattctactgcctcagccttctgagtagctgggattataggcgcctgccactgcgcccggctcatttttgtatttttagtagagatggggtttcaccatctttgccaggctggtcttgaacttgtgacctcatgatccacctgccttggtctcccaaagtgctgggattacaggcatgaaccactgtgcccagaccaaaaatacatctttatatttaataacctctaattgagatataacatttcttcctatcgtgatgtatgggacaaaccatagtagcagtagtagtagtagtagttactgtgactttgacattaatggaaatcacagatacgttcatattattttactgttattgtaggcatattgaaatatttatgctcatcactacttcagaattaatgtagtactaggcttgccactaggtcttgtttaatgttttactagagaagaaaactccaggcagagagaagaacccctgtgaaggttctgatggggaaaagcttggtgtgtttgaaggactaaatgccagtgttggtgggccccatgatcaagtgggagtggagtgtgagtcagggtttggatagacaggcaggagccacagcattcagcctttgcaggagattgtaaggagttcggactttgagcagtggaaacctaagccaaatgatactattccctgaatagattaaagggtgagagagcttggtggggagactggttgaggaggctacttcactggtctgggtaagagttgattctggtttggaagatgacattggcagtggaagacagaagagggcagtttcaaaactttacttgggagcttaactagatgaaagttactgcaagatctgccgggcgcagtggctcacgcctgtaatcccagcactttgggaggccgaggcgggaggatcatgaggtcaggagattgagaccatcctggccaacatggtgaaaccccatctttcctaaaatacaaaaaaattagccgggcgtggtggtgcacgcctgtagtcccagctacttgggagactgaggcaggggaatcgcttgaaccctggaggtgtaggttgcagtgagccgagatcacaccactgcactccagcctggcaacagagtgacactgcgtttcaaaaaaaaaaaaaaagttattgcaagagcatatagagataggaggagaaagattgtgttggaatgaattccctgttcctgttttgagatactccaataggcttcattttgatatcttcaaaccatttaatttgcctaatatccccatttttagtaagaaattgtttcataatacctgaacactttactccaaaacatgtatatacattttcctgtaaccccccagtaatcatgagttaaggattattgcccttttacagatgaagaaatggtagcttagagattaaataattgcttgtgagcacacaacgattaagtatcagaattggcagtcagctctcatcaatctgcttctggttcctgttatctttctatggcagtatgttgtactgtgtcttagtttctttccatcttccttaaactttagctccttctctctcattcactgtggtggtacataagcaagtctcctctcccctaagatcagcatctcaaaattccaaggcaaacaatatttccattgaatccccagcacataaaataattctgagttttcctatctgccacttacacacctacatcaaattagttcaatacattagacttacatctgtctcttccctcatgtgaataacccgctgttaccaattcctttttttttgttgttttgagatggagtctcactctgtcacccaggtggagtgcagtggtgcgatctcagctcacggcagcctctgcctcctgggttcaagcagttcttctgcctcagcctccggagtagctgggattacaggcacgtgccaccatgcctggctaatttttgtatttttagtagagacagggtttcaccatgctggccaggctggtctggagctcctgacctcaggtgatctgcccgcctcgtcctcccaaagtgctgggattacaggtgtgagccaccatgcccagccaccacattcaaattgtatccactgtatcctttattaaagaccttattctgtttccaccccaactgggtttgctgcagttcacttctgacactattcaggatgtggagacctcacagtcttccatagtactgtcctcacctcagatgccagctgcaagtcttgggagtcccccggctacctgcaggtcagccagctaacagcaataaattaaggggtttccaaggtctcaggttcaataatttgttagaatgactcatagaaatcaggaaagctctgtatttaaagctacagttttattaggatacatatttgagcaagatctggaactggacagtttccatgccctctccctgtggagtcagtttgtcactctcctatcacatcagtgcatttaccaaccagaaagctccactgaatttactgcccagcatttttattgaggttttattacacaggcacaattgattaaatctgtgccactcaatctctagcctctctacacttctcagaggtcaagcagctgcaagtcccacccttgtaatcacaagctagtgtttctggtaatcagaccccaccctgaagctttctaaggtcctaccatgaattaccttattagcataacaaagacctcctgtcaggaaattccaagtgtttttgaagctcagtgtggggctttattatacctcagagccaaagaatcttccccatatgcatttatttctctcaggagacctttaatggaggctagaaaatgatccacttcatgttacacatattgtatgatatacttatctcttatgtacacacgcatacttatatagatatatgtatatcatatatatctatataagtatatatatactatatagtatgtctatatatactatataaatatatatacttatctatatatactataaagatactatatatagtatagatactatatatactatatagatactatatatagtatagatactatactatatatagtatagtatctatatatactataaaagtatacttatgtacatatatatggccagtcatgttttaatatggaaaatagcccaaccattgtatatttaccagcctttccagttgattctgatccacatccatatttgagtatcattgtagtaacttatttgcgtagttaccttcctctgcttcctgcattatcttactaatttctttgtctttcttgtccattttttcagataacacagatatccttgtgaaccctgtgtcatttacctagtagatactattcttactttaatttttccatttctattataaaagtttaatttttcacaaataggaaaaaagaacatttaccattttattttctttcagatctggaatcgatgtgtgaaaccaagttattatctctaaagaaggaagtttatgaaatagaattatgccagagggagataatgggacttacaaagcatggccttgagtactccagttttggagatgttttggaatatagaagccaccttgcaaaacaactgggatatccaaatgggcattttagtcaagaaatattcactcctgaatacatgcccacatttattcaacagacattccttactctccatcaaataattaataatgaagacagaccctatgaatgtaagaaatgtggaaaggcctttagtcagaactcacaatttattcaacatcagagaattcatattggtgaaaaatcttatgaatgtaaagagtgtgggaaattctttagttgtggttcacatgttactcggcatctgaaaattcatactggcgaaaaaccctttgaatgtaaggaatgtggaaaggccttcagttgtagctcatacctttctcaacatcagagaatccataccggtaagaaaccctatgaatgtaaggaatgtgggaaggcctttagttattgctcaaatcttattgaccatcagcgaattcacactggtgaaaaaccttatgaatgtaaagtatgtgggaaagcctttactaagagctcacaactttttcagcatgcacgaattcatacaggtgagaaaccctatgaatgtaaggaatgtggcaaagcctttacccagagctcaaagcttgttcaacatcagagaattcatactggtgagaaaccctatgagtgcaaggaatgtggcaaagcctttagtagtggctcagcacttactaatcatcagagaattcacactggtgagaaaccctatgattgtaaggaatgtggaaaggcttttactcagagctcacagcttcgtcaacatcagagaattcacgctggtgagaaaccctttgaatgtcttgaatgtgggaaggcctttactcagaactcacaacttttccagcatcagagaattcatacagatgaaaaaccatatgaatgtaatgaatgtggaaaggcctttaataaatgctcaaaccttactcgacatctgagaattcacactggtgaaaagccctataactgtaaggaatgtgggaaggcttttagtagtggctcggatctcattcgtcatcagggaattcatactaataaataataaaaattaaagcccctgtcaccttcctcatattttaaaccaaaaatcatgtctaatagttaccctcttccgtagttttttttaaaactttgtatttaaattttgtatccaaatgtatttcattccaggttataaattcggagtctaaagtgacattccctctctcccccagtcatataccgatgccagctgttctataattctttcattcattgttttgttctactttcttggtgacacattatactcatgtttatatttgcttgtgtttttagagctatcttttctgatctgtgtatttgtgtttgcaccagtatcacactgtttgaattgtgtgacctttaatatttttaaattccttgtggaggtttaactttgtttttgaagttagtgttagtctttttgttttattttattattattattatatgttttttgagacggagtttcactctgttgcccaggctggagtgcagtggcgcaatctcggctcgctgcaacctccacctcccggcttcaagcaattctcctgcctcagactcctgagtagctgggatcacaggcgtgtgccaccacaccctgctaattttctatttttagtagagacagggtttctccatgttggtcaggatagtcttgaactcctgacctcaggtgatccacctgcctcagcctcccaaagtgctgggattacaggcatgagcgattgcacctggctttattttttgttgagacggagtttcgctcttgttgcctaggctggagtgcaatggtgcaatctcggctcgtcacaaccttcgcctcccaggttcaagtggttcttctgcctcagccttttgagtagttgggattacaggcatgtgccacaacacccggctaattttttgtatttttagtagagacggggtttcaccatgttagccaggatggtctcaatctcccgacttcaggtgatccacccgcctcggcctccgaaagtgctgggattacaggcgtgagccactgcggccggtctttttattttacaaatgtacatttttaattgttaagccaaaatcacaaagcaaaaaattacaaactaaaaagccaaaattaattgtaatcatacttatagatggctgctctcaatttggtagagaaaatcgtgctatactttgcttttttaagaaagtgtaattatgatatgcatgctgtacccttaactgcttttatcatgccaaagatttcatgagtgccatttcagtaaatatagatttttattattttcatgacatatttaatgactttaaaatgactattcccattatggttgccactaaatttttgcagctataaaagctgacctcggctgggcacagtggctcatgcctgtaatcccagcactttgggaggccgaggtgggcggatcacaaggtctgaagattaaggccatcctggctaacagtgaaaccccgtctctacttagctgggcgtggtggcatgtacctgtaatcccagctactcgggaggctgagacaggagaattgcttgaacctgggaggcggaggttgcagtgagctgagatggtgccactgcactccagcctgggggacagagtgagattccgtctcaaaaaaacacaaaaactgctgacctcattggatgcttatttttacttttaaaacatttattttaattgctaaaattatctacattttctccttgtgagctgttttgttcccttacatcaatcctaatcccaatgccatactagaaagtaacactgttatgaaagtgttatttatcaatccagatattaattttttgtttgtttgtttttttttttttttgagatggagttcactctgttgcccaggctgaagtgcagtggcacaatctcagttcaccacaactgctgcctcccgggttcaagcgattctcctgcctcagccttcctagtatctgagactacaggcgcacgacaccatgcctggctaatttttgtatttttagtagagacagggtttcactatgttggccaggctggtcttgaactcttgaccttgtgatccacccacctcggcctcccaaagttcggggattacaggtgtgagccactgtgcccggtcaattattttttcttatagctattagtggtgtttttgttttttgagacacagtctcgctctgttgcccaggctggagggcagtggtgcaatctcggctcactgcaacctctgcctcccgagttcaagtgagtcttccgcctcagcctcccgagtagctgggactacaggcgcgcgccaccatgcctagctaatttttgtattattagtagagatggggtttcaccatattggccaggctgctctcaaactcctgacctcgtgatcctcctgccttggcttcccaaagtgctgggattataggtgtgagccaccgcccctggctgttagtggtattttaaaaaattatgtctaggcatctataataaggctgtatgtattggattgctgtgaagagtcaatgaattaataaatgcaaagtacctcaaactgttatcacataatacaggtttagtaaaagttttccactattatcagtgatatactcattatcataagtatcttcattaggatttatggaaaggattttaaccatgttgtttacctttggcaaatttgtaattcatggtggaaaaagagaaacacttgtaatgagtataacgaagcctttccctatcattattattcagtgtggaattttaaaaggaagagaaaaagtatgtgtgcatagtctttgttcagactttatcttttatgctacataaagaataccagtctgaggctgggcgcggtggctcacacctgtaatcctagcactttgggaggccaaggtgggtggatcacttgaggtcaggagctcgagaccagcctggccaacatggtgaaaccccgtctctactaaaaatacaaaaaaaacaaaaacaaaaacaaatagccaggcatggtgttgcatgcctgtaatcctagctactcaagaggctgaggtgggaggattgcttgaacctgggagttggaggttatagtgagctgagattgcaccactgcacactccagactgggtgacagagcgagactctgtcttacaaaataaaaaataaacggttaccaatctgaaaccctgaaaatatgatgagtagtagaaagcacagctgtcaaaaaagcaggaagagattataaaattttttctaatatttccccccaaaatgcagaaaacatactggcaacattatttgaccagaagaagcagtacaataggataaccatcaaatatctgattattaattcaatattccctcttaattaacatgggttaaggaataaatccctaatatatacattatttaaatgtacatgaaaatgaaaacaattgaaaaacctgtgagtggcagtaaaagttgtattggaagttttataacctaatatttgtgcatatattgtaatactaggaagaaaaaatatagaacccaaggaactaaaacaagctgaaatgaattgtgggaggaaggaggtagtattattttaaaaggcagaaataattgaaagaaaaaaactggatctgaatccaaaattgatatttgatggaagagaaaaaaaatgagacaaagtttagtgattccagaggtgaaataaggatgacaaataaacaatattgtatatgagaaattgaaatggctatatatgtaaacttaaaagaactgtgtcatttggggtaatgaaaatgtggcatgggtaaaggttgtacaattttgtttatatactacaggtcactcaactatacactttaaaagggtgaatattatgctgtgtgaatttgatctcaatttaaaaacttaaggctggttgcagtggctcatgcctgtaattccagcactttgggaggctgaggtaggagaatggcttgaggccaggagttcaagaccagtctaggtaacataatgagatccccctcccctcatctctacagaaaaaaaaaaaaattaaaacaacaaacttaaaagttggtattatagacatttttataatatatctgaaaatctggaaaaagtctgtgatttttaataagttgacgacatcagaattaactggaggtgtaaaatcttaatagacctccctccagaataaacttatttaaaaaaataagactggccaggcatggtggctcacgcctgtaatctcagcattctgtgaggccaaggcgggtggatcacctgaggtcggggatttgagaccagcctgaccaacatggagaaaccctgtctctactaaaaatacaaaaaattagccgggcgtggtggctcatgcctgtaatcccggctactcaggaggctgaggcaggagaaaggcttgaacccgggaggcagagattgcggtgagcggggatcatgccattgcactccagcctgggcaacaagagtgaaactctctcaaaaataaataagtgaaataaaatttttcttaaaatatattttaaatgtcaaattgctacactaaaaaagacaccaaggtagagatttttataggtgaaatctatgaaatgtcttaggaaactcttctaggacatagactgagatagcaaattatctatttttaaaatttgtcataatcctgatgttacaacctactagaacccaaaacaatttgtccagaatcagttatgaaaatacagcattataaattagcaaatcaaatctagtaacccattgaaaataaatatttgtcacattctgaatttaggaaaaaacaattctgataaatcaaactttctactttctgaaacttgaaaatcaaattgatttagataagattgtatttcttagtgtctgaactcaggaaccaaatagatgtggatagcatgggatttttggaatacaagataagataatttacatgggattgcaaaagttcaaataactaaagttctgtcaatgaaaatatatgctctaacctcaacatcttctagatgaacccttttttctagcagtatttgacaggatgggatatattttataaataaacttggactattatcctatctgctgcagtatcactgttcattcatttatgccctttacttcctacttgaagggtctttaaacatagccaacatatccaatcattgctgtgcattttggatgagggtggattgcggggctgcattcaaagccatcctgggccacatgcagcctatggagcgtgggttggatgagcttgatgtaccacgttttctttatccagtctaccattgatgggcacctgggttgattccccatcattgctattgtgaatagtgctgcgatcaacatacaagtgcatttgtctttttggtagaatgatttcttttcttttgggtagatacacagtaatgggattgctgggtcaaatggtagctctgttttaagttctctgagaaatctccaggctgcttttcacactggctggactattttatgctctcaccaacagtgtataagcattctcttttctccgcagcctcaccagcatcagttgttttttgactttttgtttgagacagagtctcgctgtgtcacccaggctggagtacagtggcatgatcttggctaactgcaacctccgcctgttgggctcaaacaattctcccactttggcgtcccaagtacctgggattacaggtacatgccaccgcacccacctaatttttgtattttttgtacagatgtggtttcaccatgttgcctaggctggtctcaaactcctgggttcaagcaatcccctaccttggcctcccaaactgctaggattacaggagtgagccacggcacccagcttatatttgtgtatatgttaaattgtatatgttattttatgtatgtgtatatattaagttgtagattcacatatataattatatacacatatattacattatatgcacatatatttgtttactcgtgcaatttgtcccagcagaagtaaaaactcatataagtaaaataatatttacaggccaggcgtggtggctcacatctgtaatcccagcactttgggaggctgaggcgggaggatcacctgaagtcaggagtttgagaccagtctggccaacatggtgaaaccccgtctctactaaaaatacaaaaattagccgggtgtggtggcgcatgcttgtaatcccagctactcaggaggctaaggcaggagaatcgcttgaacccgggaggcagggtttgcagtaagccaagatcacaccattgcactccagcctggggtacaagagtgaaactccatctcaaaaaaaaaaaaaagtattatttttggtgcaaaagtactttaacatcttaaatgctcatataatggaagatactttaactcttagaaagaatgagttagctccctttctactctaaaggtatcctaatatctttgtacctgaagtggtgtctgattcaaattgttatattaaaaaaggaaaatgctttataataataataataataaaagaaactttatatagtagccctcccttatctgcaggagatgtgttctaagacccgcagaggatgtatgaaaccgtggatagtatgacccaattgctgtcgatcagaacacatttctgtttatgttttccaagcacaaatttaatgttttttttttttaatcttaactaagcacttatcacacgtggctgtattttttagagcttggggttcaacaaacaagactagcagaaatttcttttcctccttacactttcacagctagaagatttgttcttaccatagatcttagcaacctcagcacacgacttattttccttattcagtcaagaattttcacattttcacttaaaggaaacactttagggctcctcttctgcatatctaaattgacagcatcactactcttgcattttagggccatcattaggtacaattagcgtcacttaaacacaagcgctgtgatactgcggcagtcagtctgataaccaagttggctactcaccgactaagggtagcgcatacagcgtgcatctgctgaacaaaggggtgttcatatcccaggcagaataaagcaggacagtgagatatttcatcacgctcctcagaacagcccacaatttaaagcttatgaattgtttctttcgggaatcttgcatttaatattttcagaccacaatttactgtgggtaaccgaaactgtgggaagtagaaccatgaataaagggggactactgtatatgcttctgtatgtgtgtaaatacttacatgaatcgtggagaacataatgggaagatgctcatcatcttgttaactcgttatttcaagagtggaactggagggggaatactgcctttcctttatatttatttgtaatatttcattttcattatgaacatgtgttattttagtatttttaaatattaataaagacaggcaaaaacatgtaattttaattcaaggtgaaatcttcaaggcaatcatatataattaaacagagcaaataaaacattctaaatccttgaagggaaaggggaaaagaaagcacaatgtaaaaaccaagtgaatctaaacgcaacaatatatcataatgcctaagttcgtgggaccaattccaatccagtccaaggaagcagagactggcgagcaacattccctttcaggcccctgcagggtcaagagcatgctcctggaatagactgagaaactagggcaggctaagtgaggtgccaggaataaagacaccgcctgactgacacattctccactctccctacacccgctcctctcaccagcgcttccatcaggctccaattcctccctcttcccaagagcctcagattgaaaccttgcaaggaagacacccattctcaaagtcacaggcttggtaatctgagcggcaaaggtgaatgatctcgtgctccccctaatccccactactcccctcgccactgctgcctagcaccagcccctcctccataatttgaactgtcctcccaggacttggaggcgggtcggcccaagcacttcttactggccaacatggagcaaacctcccctctcttgcacatccattggctaaaagatctgtctacttaagtctgactgccaccttcccttctttctgtgctgcctggataggactgtcagctggtcgcgtttcccattggtcaccgtttccggaagcccgcccccacgtttccgggagcccggcggacgctgggtctgcagatgccatccaggcgcacggcgggtatagtggttccgcaaccttgggatgttcggctgagcgcctgcctaacatgggagcgcctgcctaaccctcctgactggagggtcagcggcggggagtcctggccttcaatcggccatcgccacggcagaaactggggcccgggctgcgtccaggcccttccccgtccgtccacaggtctcatgggcgcccggactggggctgatgtagtttcccgacctctgacacataggatctggagattaaaggtataaaaacggggacttttcagcccactcaagtaaaacacccttttatttttcggcaggtgttttgttgcagaatgccctgaggggagggagtgactgctgggtttcggtttataaaataaaataaactcctgatttagattatgtttaatatggctccccaacctttaaaaatcccactttttgccagttgtattatttagtgggatgttgaaggggggggcctgcgcctccacacctgtgggcgtttctcctcaggtgggatgaaagactgagaaaagaaaaagacacagagacaaagtatacagaaagaaaagtgggcccaggggaccagcgctcagcatatggaggacctgcgccagcactggtctctgagttccctcagtatttattgatcattatttttaccatctcagagagggggatgtggcaggacagtagggtaatagtggggagagggtcagcaggaaaacatgtgaacaaaggtctgtcataaacaaggttaagaaaaggtgctgtgctttggtgtgcgcgtacgcaaacatctcggtgcattaaagagcagtattgctgccagcgtgtctcacctccagccttaaggcagttttcacctatctcagtaaatagaacatacaatcgggttttacacggagacattccattgcccagggatgagcaggagacagatgccttcctcttacctcaactgcaaagatgccctcctctttcactaatcctcctcagcacagaccctttatgggtgtccggctgggggatggtcaggtctttccctttgctctgttaccaggctggagtgcagtggcacaatctccactcactgcaatttctacctcccagattcaagtgattctcttacttcagcctcctgagtagctgggattacaggcgcgtgtcaccacgcccagctaatttttgtatttttagtagagatggggtttcaccatgttggccaggatgatctcgatctcttgacctcatgatttgcccgcctcggcctcccaaagtgggttttgattttttttatagtggtaatgattctgtcttcttaactcctttaaaatcttagtcagtgggctgggcgctgtggctcatgcctgtaatcctagcactttgggaggccgaggcgggtggatcacttgaggtcaggtgtctgagaccagcctggccaagatggtgaaaccccatctctactaaaaatacaaaaattagccgggcgtggtggcgggcacctgtaatcccagctacccaggaggctgaggcacgagaatcacttgaacctgggaggtggaggtttcattgagccgagattgtgccactgcactccagcctgggcatagagcaagactcagtctaaaaatatatatatatatatatatatatatatatatatgttggtggatctcttactttcacaggatttatttcatagtgtgaatgagacacctcctataggctccaggttgctaacttcatgaggtgtgaagattcggtgctttataaaacagcccccacattcttcataggcctgtccttaattctcagcacccctctgcttctgacattgtacctaaaattaagttttttgtggttatatgagagctctggaaatgcccagcattagccactaatgtttccgtttgatatttccccatatcttaatagtgaccctcaatccattactcagatgggtgtccttttcttggatgtctggaaactaataccagctatccctgtgacctccctgctgagccaccattttgtcttttctcttttcttgtctacaattgtgttcgtaaccctcagctctttcatgagcagccttgatgctttcgactgcttctaactctgagtttattacccgcagtttccatgagccaagtttaggggcctgtgagaccgtcccatgtaaattttcacattcctctaaccaaaatgtagtgtttccttccatccagaatgtaggccgtagaccccgtgggtatggggcattgttaacagtgagaccacagcagtttttatgtcatctgacagcatctccaaatagccttcatggttgtcactgcttcccaatgacaattccaaataacagttcccagtgatgacttgctacttgatattgttacttaatatgttaaggtggctgttgtaggcactattactgtgtaagaaattacaccaaaatttagtggctcaacacaatcattatgtttgtggattctcatgctcatggtcaagatttcagacagggcacaagagtggcctgctgtctctgtccatgatgtctggcttcagcacggaagactcaacagctgggggctggaaccatttggaggcttgttcccttatatctgatacctggcttgggatgttggaagatggggctcagctgggactgagtgcctacatgtagtgtttccatgtggccttgacttccttacagcctggcagtctcagggtagtcagaattcttaggtggcacaggttcccagggcagatgctgagtggtcttttatgaggtaacacaacaaatccacccaggatcggggagacaggacatcgattctgcctctcaaagggaggagtggccattttttaaaaattgccacagcaacatgcctattaatatatcagaaaaatttgaagtatcctgatagctgcatttctttttttttttttttttttaaacggagtctctctctgtcatccaggctggaggagtgcagtagcacgatctcggctcattgcaacctccgcctcccgggttcaaacgattctcctgcctcagcctcctgagtagctgggactataggcacacgtcaccatgcccagctacttttgtatttttagtagagacagggtttcactatgttggccaggatggtctcgatctcttgacctcatgatctgcccacctcagcctcccaaagtgctgggattacaggggtgagccaccactcctggccaatagctgcatttctaagtaattagtctcctttgaaattctatgaattttatttcctgtagtttacagcattattttgagaagggatcaaagactcttccatatatcagaaggatcctggacagaacaagctcactgccaaccatttcccccaatatatacatgtatatatgtattttttttttttttttttttgagacacagtctcactctgttgcccaggctggagtgcagtggtgcaatcttggctcactgcagcctccgcctcatgggtttgagcgattctcgtgcctcagtcttccaagtagctgggattacagttgtgcaccaccactcctggctcattttttctatttttagtagagactggtttcattgtgttggcagggctagtcttggactcctggtctcagtgatccgcccgccttggcctcccgtagtgctgggattataggcgggagccaccatgcccagtccatttcccccagtatttgaaatgcacagtttctgctctggttcattggtcagggcaggactttctcgtttgccttaaacctaacagtagtttagaaattggcctgtaactttttttggcatgatttccttctgtttgtgctgatatttttctcacctcaataaggataggagcttcttttcctttttttttttttccaggtagaatcatgttttcttttaattgaatacttaactcacaatgtttcctgttttgcagctgctctgctaataattaggttcccacctctcaagatcattaggagcttcttttccaattcctctgttttgcatgcattggaaggtaagtttccttgtaaaccagattttggactctgcaggctttgccaaatggcctttttaccctcatgtatattgcattttctttggatagtctcatggattctcaaggatattgtattcctgtattttaccattcatgagtttagaagtgtgtttactttcctgagttttcattttctttttcttctgtcatatgtaatttacagagcaaatacctaccagaatggataacttgagagatgtggaaagtgagtttctttgcgcttatctagtgagggtgatttttagtcaataagcatttggtatatgcctgggaatccaacagctgctatttagattcagagccagcctttatttatcagctttctgatgctgaacccatcagtgaacttctctgtatatttgattcatcataaggaaaatggtgacgccgagggtgactgatttccaggtttacatcggttgccccaggggaagtgcctggcccccatctggtccttgctgctctaactttgccctgttaattgaagaaatgcaggtataaacacttcctgggttgttgctggcatttattgtcctcacagtttacagagaagcccatattttcagcctcttcctctgctttctgtcatttctgaaccatctcacccgacctggtgtaattttcattgtgtgtgagtttgcacagatgtaatttgggcctacatgtgtccaaagcctaatgcccacctcccacctccactaggatctggagctcaggacccactacctccccggcccactgcaagcttgaacatttgatggtggacacccctccctgactttgtattatggtgggttctcttgggtcttgttctctgtgggtctgtcctgcgctatactgtgtggagccggggggattttccctgtgttcccaaaagagggtcacaaggagtttttgagcaaagaggggctgatagttcttaagggtatcccacagaagggagaggccagacatattcaggaaaatcttgtttttttattcttgtaggtccagattttggatgaatctctatagagattgaacagataaggctcacctttcaatagttacaccaagaaaggcctaggtggtgacttaagctatggttttgggcagcacgagagtggtcaggtggacagtagggaagtctacatgtaacccaaacggaaaagagaaaaggcccctgagaaatcagggcaaagtcccacagtgtctctttccccatagtgtcactggtgtgggggttaccttcccactatgtctcccagaagacatgagggcacagactacagtgcctgtggacagaggagctgtggggatggaagtgtgattgcttcattcaaatgcacgccccggtgcgtgtgcgtctcttctgatgcagctccccatgggtaagctctgtgcttctccacacagtggatcaggagtggaaacattctgtctgtttagcacttgacggtttggtggtgacctgatgtcatggtgataatagaggcaatgatcctaacagcttagaactgttcagcttggccgggcctggtggctcacacctgtaatcccagcactttgggagactgaggtgggggtatcacctgaggtcaggagtttgagaccaggctggccaacatggcgaaaccccgtctctactaaaaatacaaaaattagccgggtatggtggcacacgcctgtaatcccagctacttgggaggctgaggcaggagaatcgcttgaacccggaaggtggaggcttcagtgagctgagatcttgccattgcactccagcctgggtgacggagcgagactctgtctcaaaaaaaaaaaaaaattgttcagcttgtgggtaggtatttgggaaacattatatgtattacctagtcttagttatctgcagtggttttgttattttttgcataaactgctgagaatgtttaataattgtagatgatagatcactagtcactctaaaatcttcccatttcttggtctagagctggggctggatccctcagcaacgaggagacctgaaaactagaggaaaaaaagcaggtcctccctataaaccactcatctgtgctctcttccaatttattctccttttgtgtacatcattttaaggggctataatcatcttgttcagacctcaggatataaaatgacccatctgtagacctccagccgtatcccaaagttgtctgttttgtttttttttgaaattcctgacaagtttcagttgtagctgtgccctgaggaaacattcccgattcccggagtagcttccaggttaaagtcctgtaggcttcttctgtttttagaaattcctatcagagaaagacctgattttggatttttagctttaatgcttgtgaaaagctataaaaataattttctacgcctagctttgaagtactgttagtgagaaattaaaattccttcaggaggattaaactgccatttctgttaccctaattacaaaagttttggttgttagaattttctttactgttcatgaagaagtattttatattttccttcgacattcattctctttagcaggtaattttgaactttagtttcttaaatacccaaatttggtttttcctcagtcttctctctgctacagatttctaacttaacaggaaaggcagttttcctcaaaaagggcaaagaacagcgggaacagtagagggcaccttcaaccccagcatggaattgacgttcctgcttcaaaatgaaccatcacagcaatcttggctttttgatttggaccctcatttctcttataatttgaacttatattggagagaaggggcctgtctcttaagccagctagtttttgtactggatatttatatatcatttcatttgttccttagtgttttttcatttctattatgatttgttctgtgggatgtgacttaccggtgtgtttttcacgtttataaagctgaatacttctgtatgtcagcttagcacccctagcatcagccatgctactctcctgctgtgcatagatgggggcctgtccccctgctgaatctcctgggttcctgctgtcaacacctgaaggtacccaccagatgtgtctgtcacttccctccatccacctctcttgtgtttctcatgtttctgcctccctagagaccatttctctctagagcagtgctttccaatagaaatacaatgccagacacatacgtcattttagattttctagtagtcactttagaaaagttaaaaagaggctgggcatggtagctcacacctgtaatcccagcactttgggaggctgaggtgggcagattagctgaggtcaggagttcgagaccagcctggccaacatggtgaaaccccgtcactactaaaaatacaaaaattagccgggtatggtagcaggtgcctgggattacagcctcccgagtaggctgagacatgagaatcacttgattctgggaggtggaggctgcagtgagccgaggtcatgtgcaccactgcaatccaaccttggcaacagagcaagactttgtctcacacaaaaaaaagaaaagaaagaaaagttaaaagggagcaggtgaaattaataatgtgttttatttcacctaaaatgttagtattatccagaatatcacttcaacgtcttatcaaaataaaaattattaatgagatagtttgcattcttcctcttttttgagatgggctcttgctttttttttggcccaggctggaatgcagtggcaccagcatagctcactgcagcctcaaactcctgggctcgagatcctcctgcctcagccttcctagtagttaggactacaggcacacaccaccatgcccagctaattgtttttcttttttgtttgtttgtttttcttttttttcttttttcttttttttttttttttgagaggaaatctcactctgtcacccagggtggagtgcaatggcatgatctcagctcattgcaacctccgcctcccaggtttaagtgattttcctgtctcagcctcccaagtagctgggactacaggcgtgcaccaccatgcctagctaatttttttgtatttttagtagagacagggtttcactatgttggccaggctggtcttgaactcctgacctcagctgatccacccacctcggcctcccaaagtgctgggattacaggtgtgagccactgcgccaagccttttttttttgagatagggtgatagggtctcactctgtcacccaggctgcagtggtatgatcttggctcactgcaacctctgccttccaggttccagtgatttttcccacctcagcttccctattagctgggactacaggtacacgccaccacacctggccaattttttgtattttttgtatacatagggtttcaccatgttggccaggctggtctcgaactcctgacgtcaagtgatccatctggcttggcctcccaaagtgctgggattacaggcgcgagtcaccgcacttggccttagcaatctttcaagtgctcagcagccacatgtggcagtggctgccttattggacagcgcagctctgaacggtgattttatgtacatccccactgctctctctgcctcctttattcccatctaccccacacccctgatgtctattggagggagtctactgggagtgtggaggctttcctgtccctagcatggatgacatcagcaggtggtgatgaaagtgattaaacagcattctcatcacaaaaaaaagtcaagtatttgaggtaatgggttggttaatttgatttcatcattccacatcgtaatgaaaagtcataccatcattttataccccataaatatatataatttagaagatagataaaaatcagccaaaacaattctttgaaatatttttaagcaaacatgtacaatttatggggtacaatatcatttgttagtatatataatttttttttatggggagtcagttaacacaggaaacagccccttgaaagggagatacccccacacccctggagtagcccctggaggactatcgcctccctctctcctctctttctgtctcatattcctttaatttggagaatcatttccaattccttaacattctggcctgatttttttctgtcttacattcaaaggtcacagttttcctctcaccctcatttcagtcttttcccataagatgtgacatgcctttttgtcttggttgggcatttatttgcaatacaagaatgattgttttctttgatacattaatgacttagatacttttcctagtaaaatgtatcttaacagaattccaaattaattctagacagcatatttttaaaggtgtgtatagagctccttatgtttcttccttgatttttaaaatgacatatttaggtctatatattttaggatataagatctctatgtgttgctttgcttcattgaacatttttggtgattatttttattttctgtgtattttaggatttccattaaactatattctcatttcaaatttctatctgagtgatagaattattttaatgtaggaaaggttcatcaaaaatgggtgtagtgattgtgttctttcctatgctcgaatggaaaatgatgaggggacatgatgttagagttgcagtgagaaggggtggaaaagagggattccagagtgccaggcacacaggttttctggaaggtttacatgaggactgctgtggtttgaatgtgttccccgaagttcatgtgttggaaactcaacccctaatgcaacagtgttgaccagtggaacctttaagaggtgattaggtcatgaaggctctgccctcatgaatggatgaagctagagtgggttagttatcttgggagggggttcctgataaaaggatgaggttggcttccttccctttctctttccccctccccccttcacatgtggtcactctcttgcccttccaccttccaccataggacggcacagtgagaccttcaccagatgcaggcccctcactttcccagtgttcagaaccgtaaaccaagtgaactcttgcttataaatcacccagtctgtggtattctgttatagcaacacaaacggactaagagagggacactcagtgggctcttctctctacttgatggagcactccctgcgtggtgccttgtatttgtagacatgatgctgtaaatgttttttgaatgtcttgaaggcttttgtttgaggagtttacagagaagcccctacaggcttcaggtcccttcttctgttgcttctttgctccttagttcctcccctaacctggtgctaaattagatcatagtgtggtccttggaccaacagtatcaatagcacctgaaagtcatgctggaaatacagattcacaggctgctccccagaatactgaagaagaaactctaggagtgagacccaacaatctgtgtttaacaagtccccaggtgagtctgatgcacacagaaatgtgagctgctgtattagatggtgttgagttcatgccaccggatcactgacacacacgtctgctcactgcttgctctttgcacaggcccctggatcctcctggaatccctgatccctgttgctccctggcggagttttctagtccctcttacttgaagcatgtctttcagagcccggcaccacccaagttgggtatctggtgaattctgtggtctgcatgtccatgtttgtgacattctgggaagggtggcccaggctgtgatttgccatctactgcaggctatggatggtattcagaagggaggggagatgctgtgtgcgtgttctgaagggtttcccactaaacagaccaaccctctccataactatttgatttttactttatctcctcgttgacttcacagtgtcagtgcagtttgtgtaaacatctctacggggtgatgcatgcagataaatgtttatgtgaacatataaagtctgcatgtgtgggtgaacactccacatcaggtcattgtccatcattacatatctgtggtgtctggctcattcctctcattttctgtcattttacctacttttacctgaagtacaatgactatttaataactattaaatgtttcatttcagctacacctctatggtatttttttcacctcatatcataccttcctccctcactggacttcagtgtgggacctgcaggtctcaggccttctgggaagtcccagcttttcttgaatgttctctctctctggccagctcaggctggagcagtgggtgttggtgccatcctgtggctataggtgataagccggctgttcttcactgacctggtcttaccttgaaccctggagttctcacatgcatggatttaaatgctgtgtctttctaagggcacattatggccattttccttatctccctcccaaggggctgtttcctgtatttattgactccctgtttaaaaaaaatatatgtatatatagacaaattggattgtaccccataaactgcatgttttaaaaatacttcaaagaatagtttttcatttttttcttgctggtttttatgtatcttctaaattgtatatatttatggggtataaaatgatgttgtgatttttcaatacagtgtggaatgagaatcaaattaacctatccgttacctcaagtacttgactttttttgtgatgagaaggctgtttatcactttcactcaccagctcctgctgtcttccatgctggggacaggaaaggctccacgcttgactttccctcctgttttcttatctgctgtcaacccctgaatgtaccctccaggattgacttctagaccttctacatctagctcgatcgttgtgcacccaccttcctcccagggactgtccttagggagtgactttatgcacaaacttcacatgctcttcctgcctccttcatccccagaagcccccatctcagccccatctgattatttcctccctctctcatttcctgttatgctgttggttttctaacctgaagggtaacttcttactccttagttttttgccttaatttctaagtcataggctactttcaggctaaaagttttcctccagccatggttttagtctcattctataagtcttgctaggtagtttattcattggaaattttttgtttttgagacagagtctcgctctatcacccaggctgtagtacagtggtgccatctcagctcactgcaacctccggttcccgggctcaagcagttctctttcctcagcctcctgagtagctgggattatgggtgcctgccaccacacccagctaatttttgtatttttagcagagacggcatttcaccatgtcagccaggttggtctcgaactcttgacctcaagtgatccgcccgccttggcctcccaaaatactgggattacaggggtgagtcaccgcaccccaccccttggcactatatttaagtgatgatatttttggacactgaggtagcctcattccacaggtttagatctgaagcattttcactattgcttctttccatgtatttcctggtttgcaggtcagtttcttcttttaattcatcattgacacagtggtttatatggcttttaatttcaaaagattttttaaaatatctttttgccgatttttatctatgttaattttaactagacatgttccctggaaggacatcactagttttttttttttttttccctctgtttataatttaggtggattttcacatctcaagccagctaagagtatgggaaataggactcgttaaagcacaggtatcacacaagtgattcagattcacgagggtaatccagatgaaggtatatcattgtacctggcccgcatcactcaataactgtcacctttgatttattgatttacttgagatggagtttggttctgtccccgaggccggagtgcaatggcgtgatctctgctcactacaacctctgcctcccaggttcagagtgattctcctgcctcagcctctttagctgggattacaggcacccaccaacatgcccagctaatttttgtatttttagtagagaggagctttcaccataatggccaggctggtcttgaacctcaaatgatctgcccaccttggcctcccaaagtgctaggattacaggctggagctacggagcccagcctgtcaccttgatttaaatgaatgcagctttcttggtgtcttgatgtttgtgaatttctgtggagtttgatactgctccttttgctgcttgtttttccagagtccccttatcacttgacgtgctgttatattatgtttgatttattacagataccccatcagcctgagtctcttaaaggcctttatacacatatgtctacacatagggatttggatgatctcgggatcccacatcctcgctgtcccctgtccccccacaacatcccacaccaatacctttctgaagttttctagtccctcctttttgtttgtggtccttaaagcccagccccatgcctgactttggttcccagtgagcattgtacatttgtggatattaaatctttggcaaagtcatttacctgggctggaatagggctcttggctgattctttttcctaaacacccacccaatgggagaggctgatactcaacatgcaaaccttgtgttttatttctccaggcgaagggatgttggaagacattctggaaggggtggggtgtgaagatttacaaataatctttgaatatctgcttcatgataggtcttggaggtgccttgtgggtgtggctttggggggatggttacgaggaaattgtggatattaaggaagtcaggaaaggaaaagatcagtcacaattcaacaattcagagaaagctcctaagggactttctggctgcttgatgcccagaggccaggccctcacttcgtattaaggctcaggactgtggatagagaatttaaaggggcaccaaaaaaacattaaaatagataaacatatttttaatggaatacctttaaaaatgcaaatcaatgcacaaagaaaacgcccatgttgaacaaaatggtgacaattgtgccttctcttcaacaccaccccaccctccagaagtttccttcaagccgtacctgtaagagtaaaaatagagaaaaataaaaacctttaagttaaaagataaaaatgagctgggtgtgggggctcatgcctgtaatcccagcactttgggaggccgaggcaggtggatcacttgaggtcaggagttcgagaccaggctgggcaatgtggtgaaacatcgtctctactaaaaatacaaaaaaacaaaaaaaatttaggtgggcacagtggcaggtgcctataatctcagctacttgggaggctgaggcaggagaatcgcttgaacctgggaggcggaggttgcaatgagccaagagcatgccattgcactacatcctgggagacagatcaagactctgtctcaaaaaaaacaaaacaaacaaacacctcgggaatttctggctcaagcctctgatcctcaccaccactatcaccaggggatcttttgctgttcacccaagtccagccttcatcccctaaactcctggggaaatgcgaccagactctccccatctccattccgggagtttgcctcaagccaatcttgttctccctgaaaacggccttggggttccccatcctggtacaccctcctactctaggggacacagggccgatgttgcccccaaaccggcagtcccaggagcgcatcgcttctccctgaactgcttctgccccaacctggcatctgcttggggaagggcaccccagggtggagacttgcatggtgagctcagctcaccttcaggtgaaggtcagcgcacactggccacccgggaccacattttccagaatcctttggcggtcccgcgatgctctcgtggtcagcagctctcattgggttgcagaggagaaacttgtccgtgtcactggggcatcttaacagtcggctcctaagcttggttgtgtgcgctgtgcagatgtgagaggcacaccgtgtgggcgaacccaactgcttgcctgcctctctagctccaaaactacaatccccagaggcctctgcggtcacttccactacccaccctacacaccttctgtgtgtcgcgttaatgtcagaagcacttctgtttggtggccccggctggttaggctggttggcacccagggaggcacccaggtcttccccacacctctgcacctcattacctgaccggcttctggatccgcagcgtgcatctgcagtctgtgagtcccctataggcactcagtatgcccctctgcgtgtccctctgttactcatggggacacagtctgggagccgtagacctgtctcagaactagggcgccctcctgtgggcacctccaggccattttcctttcactggagcccaccgggttagagacagaccctcactctgttgcttggggacaaaggcttcactccctggcccgagcttggggctgagctagagggttcggggtcatcctgggcccctctggatgggaattggctgccctgttaatttctgtgacatccccgaccctaacagtgggtctctggagcagactgcgcttcaccccatgggaagggggtttccacctgagagtcaaaaaagaggtgagaattctctgtaattccatcttgactgtcaacaggatggattctgttaccatttcttgccctggaggctgccttgttggtattggggaaagttcattcctagtcctggaaaagtggctcattccaactggagtcctccctcagcattcctttctgctgcatccatcctgcagtcattcatgttgttaattgtaaacaaacacacatggaacagtttaaataaaactacacagatgtgtgtgcttaattgttcagtgatgtggatgaagggcagggacagcagagatgcctgtgatttcaagggcttggggaggactcgtacaagtagagctgtctcagctgcccctgaccggtttggtaccttggagattcgggggaaggcattgcactcggaggcagaaggaagcatagtctgaggctgggctcttgctacagggtaggaaggattatggtggccaagagccttcttaaggttgatttttaaatatgcataggtgaagatacagactagctgttcacacatagaataaggagaagctttatagagtgtgacctaaattttacatcacagaacactttcaccttccggcagttgggacatttcacccaaaatttgaaattccctcctactctgaaaatgaatctggcctaactctgcactgatgaattttttttttttttttgagacagttttgtgcttgttacccaggctagagtgcagtggtgcaatctacactcaccgcaacctctgccacacgggttcaaccgattctcctgcctcagcctcccaaatagctgggatttacaggcatatgccaccacaccgcgctaactgtctggtacttttttttagtagacgcggagtttcatcatgttggttaggctggtgtgatcccctgacctcaagtgatccatccgcctcagcctcccaaattgctgggattaaagatgtgagacacctcactttgccagtatgcattgttcttagtgtcagccgctgaaactgctacttctgcgttacgcgactacgagccaccggtgagagagcagcccacgggcacacaggcggacctgtgctcgtcatcacaagggctccacttttggggagactcacccgcacaccgtccgcgcacgcctgaggctgggatcccgcgctgcctcgccggcgatctgtctgaggtttcttcctcctggggtttcttcctgctggtggaccctccgcgaatcccggcctccggagaccgtcctggtaactaccctggccaggactggtctcagcccagactcagacgcacgatcacacagggctgctacttcgccaagtgtcagggacccatccccgggcaacggtggctttcactgtggcccaagcggcggctcgggcctcgcgcatgcgcactggcgaggccgactcccccgctccacccccccttactccgcagagtcaggctgcggaccctttaaaaaatggcggcgacgcggcggctgcggggcctggggcggcggtgctggaggttgcgtcggcggcggcggcggcacagccagaggcggcgggtgggaagaggactgccagaggggcctgcgggagacccagggtcggacccataggagtcctgtggtgaggacctccttgatcgctcttctgcttcggttcccgctgaaggaggagtttcgggatgccggctgggctgcgcggactcctcttggggtccgatgatggatccaaccgggtgatcgggaatggggttccaatgcagtgaggccgaaagggtctcgccggggcacagaaagatccccagggccgcaaggcgtgctgtcggctgcaaaggcaccgacccatgagcccactgcctccctccctcctggcaggagcaggggcctgccttcatctccaaggcccgagggctccggcatcccgacgcggcttccggcgacacgggcaaagagagacagaggcgagtccgagctggagccagcgtgtccacatgtggcactgtcgtcccccaagagcacatgcaggcagcctgtgtctttgaggctgtagggggcgacgacaagacggacagtgatgtccaggcgtgcgcccggggggccactggagaccggccccacaaagcgaggaaaagccaagcgcacctgaaaacctgcgagacagggcctgtgcgcgagtccacgccacgttcagggaggcccgccagaggagccgagaggtttggacaaagtacaccccacccccagcccgccgccggctaggtacccctgacgcaacctcccctgcacccagccaaaacccagtcccgttggctccctgacatccgtggcagccaaaagattcggtgctagaaggcactttccccaggagcggaggaaccggttggccctcaagaatcagagaggaagtgcaggtgggatgcaacaccgcctttcctagaaggccaatgtcaggagcggtgggcttgcctccgcctcttcctggaccgagcgtgcagccatcacttgggccatggagaccgagagagcttccctgtcccacacaggtatggaagcccagagctccaggatcaccacagctgcccaatcatccagaaagaggtgtggagagggaaacaatcatgacgcggaccgccacgaggtttctccctgatggacggggaagtcttctttgtggaagacactgagccacgctaagaagccgccaggcttctcagagacggggcagacacagcaagagggaggtcagagcagaggccagagcccaggcaggatacgggggggccatgccaccaccaccggcatccggggaggagtgtcaaacgggtgactcggccaggaaggccagcctttgagagacagacatgcttgccccatccccttgccggcttccttctccgtccctgcgtcgagctgtggctacatttctcgatgagggcagagggcgacaggcgtgacaaccaccttcttgaagctctgcgggcaccctcctgcgggtggacaatgagcgcctgggaggccgttgtccttggttggggagcgctcgtctggatccagcctagcaaagaggctgctccggatggggaggggatgaaaacccctgcgggttcgacgccgatgcccacgttgcccaggccttcacagacccccaaactggaactgccgggaccacgactgccaaccggccacacgacccaggcagagacgcggggacacgctgaccagaagaaaggccgacgtgcaagaaacccaccctccggcgcacagggcccatgtgtcccaaggcgcacgcacacacagacggacagagacagaaagagagggcgaccgaaagagcgagaagggagagagacaaagagagagagagagagagagagagagagagagagagagagacgtgagagagagacagaagtcggcacacagacacgcactgcgcgcgcacacacacagacaaacacacagacgcatccccccaacacacacacacacacccataacgaacacacacgtacagcagggaacacccacccgcaggcagcccctgaagctgccgggttctgctctccgcgactaagagccaccggtgagagagcagcccacgggcacacaggcggacctgtgctcgtcatcacaagggctccacttttggggagactcacccgcacaccgtccgcgcacgcctgaggctgggatcccgcgctgcctcgccggcgatctgtctgaggtttcttcctcttggggtttcttcctgctggtggaccctccgcgaatcccggcctccggagaccgtcctggtaactgccctggccaggactggtctcagcccagactcagacgcacgatcacacagggctcctacttcgccaagtgtcagggacccatccccgggcaacggtggctttcactttgacccaagcggcggcttgggcctcgcgcatgcgcactggcgaggccgactccccccgctccagccccccttactccgcagagtcaggctgcggaccctttaaaaaatggcggcgacgcggcggctgcggggcctggggcggcggtgctggaggttgcggcggcggcggtggcggcgcagcccgaggcggcgggtgggaagaggactgccagaggggcctgcgggagacccagggtcggacccataggagtcctgtggtgaggacctccttgatcgctcttctgcttcggttcccgcgaaaggaggagcttcgggatgccggctgggctgcgcggactcctcttggggtccgatgatggatccaaccgggtgatcgggaatggggttccaatgcagtgaggccgaaagggtctcgccggggcacagaaagatccccagggccgcaaggcgtgctgtcggctgcaaaggcaccgacccatgagcccactgcctccctccctcctggcaggagcaggggcctgccttcatctccaaggcccgagggctccggcatcccgacgcggcttccggcgacacgggccaagagagacagaggcgagtccgagctggtgccagcgtgtccacatgtggcactgtcgtcccccaagagcacatgcaggtagcgtgtgtctttgaggccgtagggggcgacgacgagacggacagtgatgtccaggcgtgcgcccggggggccactggagacctgccccacaaagcggaggaaaagccaagcgcacctgaaaacctgcgagacagggcctgtgcgcgagtccacgccacgttcagggaggcccgccagaggagccgagaggtttggacaaagtacaccccacccccagcccgccgccggctaggtacccctgacgcaacctcccctgcacccagccaaaacccagtcccgttggctccctgacatccgtggcagccaaaagattcggtgctagaaggcactttccccaggagcggaggaaccggttggccctcaagaatcagagaggaagtgcaggtgggatgcaacaccgcctttcctagaaggccaatgtcaggagcggtgggcttgcctccgcctcttcctggaccgagcgtgcagccatcacttgggccatggagaccgagagagcttccctgtcccacacaggtatggaagcccagagctccaggatcaccacagctgcccaatcatccagaaagaggtgtggagagggaaacaatcatgacgcggaccgccacgaggtttctccctgatggacggggaagtcttgtttgtggaagacactgagccacactaagaagccgccaggcttctcagagacggggcagacacagcaagagggaggtcagagcagaggccagagcccaggcaggatacgggggggccatgccaccaccaccggcatccggggaggagtgtcaaacgggtgactcggccaggaaggccagcctttgagagacagacatgcttgccccatccccttgccggcttccttctccgtccctgcgtcgagctgtggctacatttctcgatgagggcagagggcgacaggcgtgacaaccaccttcttgaagctctgcgggcacccttcctgcgggtggacaatgagcgcctgggaggccgttgtccttggttggggagcgctcgtctggatccagcctagcaaagaggctgctccggatggggaggggatgaaaaccctgcgggtccgacacccatgcccacgttgcccaggccttcacagacccccaaactggaaccgccgggacgacgactgccaaccggccacacgacccaggcagagacgcggggagacgctgaccagaagaaaggccgacgtgcaagaaatccaccctccggcgcacagggcccatgtgtcccaaggcgcacgcatacacagacggacagagacagaaagagagggcgaccgaaagagcgagaagggagagagacagagagagagagagagagagagagagagagagagagagagagacagaagtcggcacacagacacgcactgcgcgcgcacacacacagacacacacacagacgcatccccccaacacacacacacacacccataacgaacacacacgtacagcagggaacacccacccgcaggcagcccctgaagctgccgggttctgctctccgcgactaagagccaccggtgagagagcagcccacgggcacacaggcggacctgtgctcgtcatcacaagggctccacttttggggagactcacccgcacaccgtccgcgcacgcctgaggctgggatcccgcgctgcctcgccggcgatctgtctgaggtttcttcctcctggggtttcttcctgctggtggaccctccgcgaatcccggcctccggagaccgtcctggtaactaccctggccaggactggtctcagcccagactcagacgcacgatcacacagggctgctacttcgccaagtgtcagggacccatccccgggcaacggtggctttcactgtggcccaagcggcggctcgggcctcgcgcatgcgcactggcgaggccgactcccccgctccacccccccttactccgcagagtcaggctgcggaccctttaaaaaatggcggcgacgcggcggctgcggggcctggggcggcggtgctggaggttacgtcggcggcggcggcggcacagccagaggcggcgggtgggaagaggactgccagaggggcctgcgggagacccagggtcggacccataggagtcctgtggtgaggacctccttgatcgctcttctgcttcggttcccgctgaaggaggagtttcgggatgccggctgggctgcgcggactcctcttggggtccgatgatggatccaaccgggtgatcgggaatggggttccaatgcagtgaggccgaaagggtctcgccggggcacagaaagatccccagggccgcaaggcgtgctgtcggctgcaaaggcaccgacccatgagcccactgcctccctccctcctggcaggagcaggggcctgccttcatctccaaggcccgagggctccggcatcccgacgcggcttccggcgacacgggcaaagagagacagaggcgagtccgagctggagccagcgtgtccacatgtggcactgtcgtcccccaagagcacatgcaggcagcgtgtgtctttgaggccgtagggggcgacgacgagacggacagtgatgtccaggcgtgcgcccggggggccactggagacctgccccacaaagcggaggaaaagccaagcgcacctgaaaacctgcgagacagggcctgtgcgcgagtccacgccacgttcagggaggcccgccagaggagccgagacgtttggacaaagtacaccccacccccagcccgccgccggctaggtacccctgacgcaacctcccctgcacccagccaaaacccagtcccgttggctccctgacatccgtggcagccaaaagattcggtgctagaaggcactttccccaggagcggaggaaccggttggccctcaagaatcagagaggaagtgcaggtgggatgcaacaccgcctttcctagaaggccaatgtcaggagcggtgggcttgcctccgcctcttcctggaccgagcgtgcagccatcacttgggccatggagaccgagagagcttccctgtcccacacaggtatggaagcccagagctccaggatcaccacagctgcccaatcatccagaaagaggtgtggagagggaaacaatcatgacgcggaccgccacgaggtttctccctgatggacggggaagtcttgtttgtggaagacactgagccacgctaagaagccgccaggcttctcagagacggggcagacacagcaagagggaggtcagagcagaggccagagcccaggcaggatacgggggggccatgccaccaccaccggcatccggggaggagtgtcaaacgggtgactcggccaggaaggccagcctttgagagacagacatgcttgccccatccccttgccggcttccttctccgtccctgcgtcgagctgtggctacatttctcgatgagggcagagggcgacaggcgtgacaaccaccttcttgaagctctgcgggcaccctcctgcgggtggacaatgagcgcctgggaggccgttgtccttggttggggagcgctcgtctggatccagcctagcaaagaggctgctccggatggggaggggatgaaaacccctgcgggttcgacgccgatgcccacgttgcccaggccttcacagacccccaaactggaactgccgggacgacgactgccaaccggccacacgacccaggcagagacgcggggacacgctgaccagaagaaaggccgacgtgcaagaaacccaccctccggcgcacagggcacatgtgtcccaaggcgcacgcacacacagacggacagagacagacagagagggcgacggaaacagcgagaagggagagagagagagagagagagagagagagagagagagagagagagagagaggtgagagagagtcagaagtcggcacacagacacgcactgcgcgcgcacacacacagacacacacacagacgcacccccccaacacacacacacacacccataacgaacacacacgtacagcagggaacacccacccgcaggcagcccctgaagctgccgggttctgctctccgcgactaagagccaccggtgagagagcagcccacgggcacacaggcggacctgtgctcgtcatcacaagggctccacttttggggagactcacccgcacaccgtccgcgcacgcctgaggctgggatgccgcgctgcctcgccggcgatctgtctgagttttcttcctcctggcgtttcttcctgctggtggaccctccgcgaatcccggcctccggaaaccgtcctggtaactgccctgaccaggactggtctcagcccagactcagacgcacgatcacacagggctcctacttcgccaagtgtcagggacccatccccgggcaacggtggctttcactgtgacccaagcggcggcttgggcctcgcgcatgcgcactggcgaggccgactcccccgctccacccccccttactccgcagagtcaggctgcggaccctttaaaaaatggcggcgacgcggcggctgcggggcctggggcggcggtgctggaggttgcggcggcggcggtggcggcgcagcccgaggcggcgggtgggaagaggactgccagaggggcctgcggcagacccagggtcggactcataggagtcctgtggtgaggacctccttgatcgctcttctgcttcggttcccgctgaaggaggagcttcgggatgccggctgggctgcgcggactcctcttggggtccgatgatggatccaaccgggtgatcgggaatggggttccaatgcagtgaggccgaaagggtctcgccggggcacagaaagatccccagggccgcaaggcgtgctgtcggctgcaaaggcaccgacccatgagcccactgcctccctccctcctggcaggagcaggggcctgccttcatctccaaggcccgagggctccggcatcccgacgcggcttccggcgacacgggcaaagagagacagaggcgagtccgagctggtgccagtgtgtccacatgtggcactgtcgtcccccaagagcacatgcaggccgcgtgtgtctttgaggccgtagggggcaacgacgagacggacagtgatgtccaggcgtgcgcccggggggccactggagacctgccccacaaagcggaggaaaagccaagcgcacctgaaaacctgcgagacagggcctgtgcgcgagtccacgccacgttcagggaggcccgccagaggagccgagacgtttggacaaagtacaccccaccctcagcccgccgccggctaggtacccctgacgcaaactcccctgcacccagccaaaacccagtcccgttggctccctgacatccgtggcagccaaaagattcggtgctagaaggcactttccccaggagcggaggaaccggttggccctcaagaatcagagaggaagtgcaggtgggatgcaacaccgcctttcctagaaggccaatgtcaggagcggtgggcttgcctccgcctcttcctggaccgagcgtgcagccatcacttgggccatggagaccgagagagcttccctgtcccacacaggtatggaagcccagagctccaggatcaccacagctgcccagtcatccagaaagaggtgtggagagggaaacaatcatgacgcggaccgccacgaggtttctccctgatggacggggaagtcttctttgtggaagacactgagccacgctaagaagccgccaggcttctcagagacggggcagacacagcaagagggaggtcagagcagaggccagagcccaggcaggatacgggggggccatgccaccaccaccggcatccggggaggactgtcaaacgggtgactcggccaggaaggccagcctttgagagacagacatgcttgccccatccccttgccggcttccttctccgtccctgcgtcgagctgtggctacatttctcgatgagggcagagggcgacaggcgtgacaaccaccttcttgaagctctgcgggcaccctcctgcgggtggacaatgagcgcctgtgaggccgttgtccttggttggggagcgctcgtctggatccagcctagcaaagaggctgctccggatgtggaggggatgaaaacccctgcgggttcgacgccgatgcccacgttgcccaggccttcacagacccccaaactggaactgccgggacgacgactgccaaccggccacacgacccaggcagagacgcggggacacgctgaccagaagaaaggccgacgtgcaagaaacccaccctccggcgcacagggcacatgtgtcccaaggcgcacgcacacacagacggacagagacagacagagagggcgacggaaacagcgagaagggagagagagagagagagagagagagacagagagagacgtgagagagacacagaagtcggcacacagacacgcactgcgcgcgcacacacacagacacacacacagacgcacccccccaacacacacacacacacccataacgaacacacacgtacagcagggaacacccacccgcaggcagcccctgaagctgccgggttctgctctccgcgactaagagccaccggtgagagagcagcccacgggcacacaggcggacctgtgctcgtcatcacaagggctccacttttggggagactcacccgcacaccgtccgcgcacgcctgaggctgggatcccgcgctgcctcgccggcgatctgtctgaggtttcttcctcttggggtttcttcctgctggtggaccctccgcgaatcccggcctccggagaccgtcctggtaactgccctggccaggactggtctcagcccagactcagacgcacgatcacacagggctcctacttcgccaagtgtcagggacccatccccgggcaacggtggctttcactttgacccaagcggcggcttgggcctcgcgcatgcgcactggcgaggccgactccccccgctccagccccccttactccgcagagtcaggctgcggaccctttaaaaaatggcggcgacgcggcggctgcggggcctggggcggcggtgctggaggttgcggcggcggcggtggcggcgcagcccgaggcggcgggtgggaagaggactgccagaggggcctgcgggagacccagggtcggacccataggagtcctgtggtgaggacctccttgatcgctcttctgcttcggttcccgcgaaaggaggagcttcgggatgccggctgggctgcgcggactcctcttggggtccgatgatggatccaaccgggtgatcgggaatggggttccaatgcagtgaggccgaaagggtctcgccggggcacagaaagatccccagggccgcaaggcgtgctgtcggctgcaaaggcaccgacccatgagcccactgcctccctccctcctggcaggagcaggggcctgccttcatctccaaggcccgagggctccggcatcccgacgcggcttccggcgacacgggccaagagagacagaggcgagtccgagctggtgccagcgtgtccacatgtggcactgtcgtcccccaagagcacatgcaggtagcgtgtgtctttgaggccgtagggggcgacgacgagacggacagtgatgtccaggcgtgcgcccggggggccactggagacctgccccacaaagcggaggaaaagccaagcgcacctgaaaacctgcgagacagggcctgtgcgcgagtccacgccacgttcagggaggcccgccagaggagccgagaggtttggacaaagtacaccccacccccagcccgccgccggctaggtacccctgacgcaacctcccctgcacccagccaaaacccagtcccgttggctccctgacatccgtggcagccaaaagattcggtgctagaaggcactttccccaggagcggaggaaccggttggccctcaagaatcagagaggaagtgcaggtgggatgcaacaccgcctttcctagaaggccaatgtcaggagcggtgggcttgcctccgcctcttcctggaccgagcgtgcagccatcacttgggccatggagaccgagagagcttccctgtcccacacaggtatggaagcccagagctccaggatcaccacagctgcccaatcatccagaaagaggtgtggagagggaaacaatcatgacgcggaccgccacgaggtttctccctgatggacggggaagtcttgtttgtggaagacactgagccacgctaagaagccgccaggcttctcagagacggggcagacacagcaagagggaggtcagagcagaggccagagcccaggcaggatacgggggggccatgcctccaccaccggcatccggggaggactgtcaaacgggtgactcggccaggaaggccagcctttgagagacagacatgcttgccgccccatccccttgccggcttccttctccgtccctgcgtcgagctgtggctacatttctcgatgagggcagagggcgacaggcgtgacaaccaccttcttgaagctctgcgggcaccttcctgcgggtggacaatgagcgcctgggaggccgttgtccttggttggggagcgctcgtctggatccagcctagcaaagaggctgctccggatggggaggggatgaaaacccctgcgggttcgacgccgatgcccacgttgcccaggccttcacagacccccaaactggaactgctgggacgacgactgccaaccggccacacgacccaggcagagacgcggggagaggctgaccagaaggaaggccgacgtgcaagaaacccaccctccggcgcacagggcacatgtgtcccaaggcgcacgcacacacagacggacagagacagacagagagggcgacggaaacagcgagaagggagagagagagagagagagagagagacagagagagacgtgagagagagacagaagtcggcacacagacacgcactgcgcgcgcacacacacagacacacacacagacgcatccccccaacacacacacacacacccataacgaacacacacgtacagcagggaacacccacccgcaggcagcccctgaagctgccgggttctgctctccgcgactaagagccaccggtgagagagcagcccacgggcacacaggcggacctgtgctcgtcatcacaagggctccacttttggggagactcacccgcacaccgtccgcgcacgcctgaggctgggatgccgcgctgcctcgccggcgatctgtctgagttttcttcctcctggggtttcttcctgctggtggaccctccgcgaatcccggcctccggagaccgtcctggtaactgccctggccaggactggtctcagcccagactcagacgcacgatcacacagggctcctacttcgccaagtgtcagggacccatccccgggcaacggtggctttcactgtgacccaagcggcggcttgggcctcgcgcatgcgcactggcgaggccgactcccccgctccacccccccttactccgcagagtccggctgcggaccctttaaaaaatggcggcgacgcggcggctgcggggcctggggcggcggtgctggaggttgcggcggcggcggtggcggcgcagcccgaggcggcgggtgggaagaggactgccagaggggcctgcgggagacccagggtcggacccataggagtcctgtggtgaggacctccttgatcgctcttctgcttcggttcccgcgaaaggaggagcttcgggatgccggctgggctgcgcggactcctctcggggtcggatgatggatccaaccgggtgatcgggaatggggttccaatgcagtgaggccgaaagggtctcgccggggcacagaaagatccccagggccgcaaggcgtgctgtcggctgcaaaggcaccgacccatgagcccactgcctccctccctcctggcaggagcaggggcctgccttcatctccaaggcccgagggctccggcatcccgacgcggcttccggcgacacgggcaaagagagacagaggcgagtccgagctggtgccagcgtgtccacatgtggcactgtcgtcccccaagagcacatgcaggcagcgtgtgtctttgaggccgtagggggcgacgacgagacggacagtgatgtccaggcgtgcgcccggggggccactggagacctgccccacaaagcggaggaaaagccaagcgcacctgaaaacctgcgagacagagcctgtgcgcgagtccacgccacgttcagggaggcccgccagaggagccgagaggtttggacaaagtacaccccacccccagcccgccgccggctaggtacccctgacgcaacctcccctgcacccagccaaaacccagtcccgttggctccctgacatccgtggcagccaaaagattcggtgctagaaggcactttccccaggagcggaggaaccggttggccctcaagaatcagagaggaagtgcaggtgggatgcaacaccgcctttcctagaaggccaatgtcaggagcggtgggcttgcctccgcctcttcctggaccgagcgtgcagccatcacttgggccatggagaccgagagagcttccctgtcccacacaggtatggaagcccagagctccaggatcaccacagctgcccaatcatccagaaagaggtgtggagagggaaacaatcatgacgcggaccgccacgaggtttctccctgatggacggggaagtcttctttgtggaagacactgagccacgctaagaagccgccaggcttctcagagacggggcagacacagcaagagggaggtcagagcagaggccagagcacaggcaggatacggggggaccatgccaccaccaccggcatccggggaggactgtcaaacgggtgactcggccaggaaggccagcctttgagagacagacatgcttgccgccccatccccttgccggcttccttctccgtccctgcgtcgagctgtggctacatttctcgatgagggcagagggcgacaggcgtgacaaccaccttcttgaagctctgcgggcaccctcctgcgggtggacaatgagcgcctgggaggccgttgtccttggttggggagcgctcgtctggatccagcctagcaaagaggctgctccggatggggaggggatgaaaaccctacgggtccgacacccatgcccacgttgcccaggccttcacagacccccaaactggaactgccgggacgacgactgccaaccggccacacgacccaggcagagacgcggggagacgctgaccagaagaaaggccgacgtgcaagaaatccaccctccggcgcacagggcccatgtgtcccaaggcgcacgcacacacagacggagagagacagaaagagagggcgaccgaaagagcgagaagggagagagacagagagagagagagagagagagagagagagagagagagacagaagtcggcacacagacacgcactgcgcgcgcacacacacagacacacacacagacgcatccccccaacacacacacacacacccataacgaacacacacgtacagcagggaacacccacccgcaggcagcccctgaagctgccgggttctgctctccgcgactaagagccaccggtgagagagcagcccacgggcacacaggcggacctgtgctcgtcatcacaagggctccacttttggggagactcacccgcacaccgtccgcgcacgcctgaggctgggatcccgcgctgcctcgccggcgatctgtctgaggtttcttcctcttggggtttcttcctgctggtggaccctccgcgaatcccggcctccggagaccgtcctggtaactgccctggccaggactggtctcagcccagactcagacgcacgatcacacagggctcctacttcgccaagtgtcagggacccatcccctggcaacggtggctttcactgtgacccaagcggcggcttgggcctcgcgcatgcgcactggcgaggccgactcccccgctccacccccccttactccacagagtcaggctgcggaccctttaaaaaatggcggcgacgcggcggctgcggggcctggggcggcggtgctggaggttgcggcggcggcggtggcggcgcagcccgaggcggcgggtgggaagaggactgccagaggggcctgcgggagacccagggtcggacccataggagtcctgtggtgaggacctccttgatcgctcttctgcttcggttcccgcgaaaggaggagcttcgggatgccggctgggctgcgcggactcctcttggggtccgatgatggatccaaccgggtgatcgggaatggggttccaatgcagtgaggccgaaagggtctcgccggggcacagaaagatccccagggccgcaaggcgtgctgtcggctgcaaaggcaccgacccatgagcccactgcctccctccctcctggcaggagcaggggcctgccttcatctccaaggcccgagggctccggcatcccgacgcggcttccggcgacacgggcaaagagagaggcgagtccgagctgcagccagcgtgtccacatgtggcactgtcgtcccccaagagcacatgcaggcagcgtgtgtctttgaggccgtagggggcgacgacgagacggacagtgatgtccaggcgtgcgcccggggggccactggagacctgccccacaaagcggaggaaaagccaagcgcacctgaaaacctgcgagacagggcctgtgcgcgagtccacgccacgttcagggaggcccgccagaggagccgagaggtttggacaaagtacaccccacccccagcccgccgccggctaggtacccctgacgcaacctcccctgcacccagccaaaacccagtcccgttggctccctgacatccgtggcagccaaaagattcggtgctagaaggcactttccccaggagcggaggaaccggttggccctcaagaatcagagaggaagtgcaggtgggatgcaacaccgcctttcctagaaggccaatgtcaggagcggtgggcttgcctccgcctcttcctggaccgagcgtgcagccatcacttgggccatggagaccgagagagcttccctgtcccacacaggtatggaagcccagagctccaggatcaccacagctgcccagtcatccagaaagaggtgtggagagggaaacaatcatgacgcggaccgccacgaggtttctccctgatggacggggaagtcttctttgtggaagacactgagccacgctaagaagccgccaggcttctcagagacggggcagacacagcaagagggaggtcagagcagaggccagagcccaggcaggatacgggggggccatgccaccaccaccggcatccggggaggagtgtcaaacgggtgactcggccaggaaggccagcctttgagagacagacatgcttgccccatccccttgccggcttccttctccgtccctgcgtcgagctgtggctacatttctcgatgagggcagagggcgacaggcgtgacaaccgccttcttgaagctctgcgggcaccctcctgcgggtggacaatgagcgcctgggaggccgttgtccttggttggggagcgctcgtctggatccagcctagcaaagaggctgctccggatggggaggggatgaaaacccctgcgggttcgacgccgatgcccacgttgcccaggccttcacagacccccaaactggaactgccgggacgacgactgccaaccggccacacgacccaggcagagacgcggggagaggctgaccagaagaaaggccgacgtgcaagaaacccaccctccggcgtacagggcacatgtgtcccaaggcgcacgcacacacagacggacagagatagaaagagagggcgacggaaacagcgagaagggagagagagagagagagagagagagagagacagagagagacgtgagagagagacagaagtcggcacacagacacgcactgcgcgcgcacacacacagacacacacacagacgcacccccccaacacacacacacacacccataacgaacacacacgtacagctgggaacacccacccgcaggcagcccctgaagctgccgggttctgctctccgagactaagagccaccggtgagagagcagcccacgggcacacaggcggacctgtgctcgtcatcacaagggctccacttttggggagactcacccgcacaccgtccgcgcacgcctgaggctgggatcccgcgctgcctcgccggcgatctgtctgaggtttcttcctcttggggtttcttcctgctggtggaccctccgcgaatcccggcctccggagaccgtcctggtaactgccctggccaggactggtctcagcccagactcagacgcacgatcacacagggctcctacttcgccaagtgtcagggacccatccccgggcaacggtggctttcactgtgacccaagcggcggcttgggcctcgtgcatgcgcactggcgaggccgactcccccgctccacccccccttactccgcagagtcaggctgcggaccctttaaaaaatggcggcgacgcggcggctgcggggcctggggcggcggtgctggaggttgcggcggcggcggtggcggcgcagcccgaggcggcgggtgggaagaggactgccagaggggcctgcgggagacccagggtcggacccataggagtcctgtggtgaggacctccttgatcgctcttctgcttcggttcccgcgaaaggaggagcttcgggatgccggctgggctgcgcggactcctcttggggtccgatgatggatccaaccgggtgatcgggaatggggttccaatgcagtgaggccgaaagggtctcgccggggcacagaaagatccccagggccgcaaggcgtgctgtcggctgcaaaggcaccgacccatgagcccactgcctccctccctcctggcaggagcaggggcctgccttcatctccaaggcccgagggctccggcatcccgacgcggcttccggcgacacgggcaaagagagacagaggcgagtccgagctggtgccagcgtgtccacatgtggcactgtcgtcccccaagagcacatgcaggcagcgtgtgtctttgaggccgtagggggcaacgacgagacggacagtgatgtccaggcgtgcgcccggggggccactggagacctgccccacaaagcggaggaaaagccaagcgcacctgaaaacctgcgagacagggcctgtgcgcgagtccacgccacgttcagggaggcccgccagaggagccgagaggtttggacaaagtacaccccaccctcagcccgccgccggctaggtacccctgacgcaaactcccctgcacccagccaaaacccagtcccgttggctccctgacatccgtggcagccaaaagattcggtgctagaaggcactttccccaggagcggaggaaccggttggccctcaagaatcagagaggaagtgcaggtgggatgcaacaccgcctttcctagaaggccaatgtcaggagcggtgggcttgcctccgcctcttcctggaccgagcgtgcagccatcacttgggccatggagaccgagagagcttccctgtcccacacaggtatggaagcccagagctccaggatcaccacagctgcccagtcatccagaaagaggtgtggagagggaaacaatcatgacgcggaccgccacgaggtttctccctgatggacggggaagtcttctttgtggaagacactgagccacgctaagaagccgccaggcttctcagagacggggcagacacagcaagagggaggtcagagcagaggccagagcccaggcaggatacgggggggccatgccaccaccaccggcatccggggaggactgtcaaacgggtgactcggccaggaaggccagcctttgagagacagacatgcttgccccatccccttgccggcttccttctccgtccctgcgtcgagctgtggctacatttctcgatgagggcagagggcgacaggcgtgacaaccaccttcttgaagctctgcgggcaccctcctgcgggtggacaatgagcgcctgtgaggccgttgtccttggttggggagcgctcgtctggatccagcctagcaaagaggctgctccggatgtggaggggatgaaaacccctgcgggttcgacgccgatgcccacgttgcccaggccttcacagacccccaaactggaactgccgggacgacgactgccaaccggccacacgacccaggcagagacgcggggacacgctgaccagaagaaaggccgacgtgcaagaaacccaccctccggcgcacagggcacatgtgtcccaaggcgcacgcacacacagacggacagagacagacagagagggcgacggaaacagcgagaagggagagagagagagagagagagagagacagagagagacgtgagagagacacagaagtcggcacacagacacgcactgcgcgcgcacacacacagacacacacacagacgcacccccccaacacacacacacacacccataacgaacacacacgtacagcagggaacacccacccgcaggcagcccctgaagctgccgggttctgctctccgagactaagagccaccggtgagagagcagcccacgggcacacaggcggacctgtgctcgtcatcacaagggctccacttttggggagactcacccgcacaccgtccgcgcacgcctgaggctgggatgccgcgctgcctcgccggcgatctgtctgagttttcttcctcctggggtttcttcctgctggtggaccctccgcgaatcccggcctccggagaccgtcctggtaaatgccctggccaggactggtctcagcccagactcagacgcacgatcacacagggctcctacttcgccaagtgtcagggacccatccccgggcaacggtggctttcactgtgacccaagcggcggcttgggcctcgcgcatgcgcactggcgaggccgactcccccgctccacccccccttactccgcagagtcaggctgcggaccctttaaaaaatggcggcgacgcggcggctgcggggcctggggcggcggtgctggaggttgccgtggcggcggtggcggcgcagcccgaggcggcgggtgggaagaggactgccagaggggcctgcgggagacccagggtcggacccataggagtcctgtggtgaggacctccttgagcgctcttctgcttcggttcccgctgaaggaggagcttcgggatgccggctgggctgcgcggactcctcttggggtccgatgatggatccaaccgggtgatcgggaatggggttccaatgcagtgaggccgaaagggtctcgccggggcacagaaagatccccagggccgcaaggcgtgctgtcggctgcaaaggcaccgacccatgagcccactgcctccctccctcctggcaggagcaggggcctgccttcatctccaaggcccgagggctccggcatcccgacgcggcttccggcgacacgggcaaagagagacagaggcgagtccgagctggagccagcgtgtccacatgtggcactgtcgtcccccaagagcacatgcaggcagcgtgtgtctttgaggccgtagggggcgacgacgagacggacagtgatgtccaggcgtgcgcccggggggccactggagacctgccccacaaagcggaggaaaagccaagcgcacctgaaaacctgcgagacagggcctgtgcgcgagtccacgccacgttcagggaggcccgccagaggagccgagaggtttggacaaagtacaccccacccccagcccgccgccggctaggtacccctgacgcaacctcccctgcacccagccaaaacccagtcccgttggctccctgacatccgtggcagccaaaagattcggtgctagaaggcactttccccaggagcggaggaaccggttggccctcaagaatcagagaggaagtgcaggtgggatgcaacaccgcctttcctagaaggccaatgtcaggagcggtgggcttgcctccgcctcttcctggaccgagcgtgcagccatcacttgggccatggagaccgagagagcttccctgtcccacacaggtatggaagcccagagctccaggatcaccacagctgcccaatcatccagaaagaggtgtggagagggaaacaatcatgacgcggaccgccacgaggtttctccctgatggacggggaagtcttctttgtggaagacactgagccacgctaagaagctgccaggcttctcagagacggggcagacacagcaagagggaggtcagagcagaggccagagcccaggcaggatacgggggggccatgccaccaccaccggcatccggggaggagtgtcaaacgggtgactcggccaggaaggccagcctttgagagacagacatgcttgccccatccccttgccggcttccttctccgtccctgcgtcgagctgtggctacatttctcgatgagggcagagggcgacaggcgtgacaaccaccttcttgaagctctgcgggcaccctcctgcgggtggacaatgagcgcctgggaggccgttgtccttggttggggagcgctcgtctggatccagcctagcaaagaggctgctccggatggggaggggatgaaaacccctgcgggttcgacgccgatgcccacgttgcccaggccttcacagacccccaaactggaactgccgggacgacgactgccaaccggccacacgacccaggcagagacgcggggacacgctgaccagaagaaaggccgacgtgcaagaaacccaccctccggcgcacagggcacatgtgtcccaaggcgcacgcacacacagacggacagagacagacagagagggcgacggaaacagcgagaagggagagagagagagagagagacagagagacagagagagacgtgagagagagacagaagtcggcacacagacacgcactgcgcgcgcacacacacagacacacacacagacgcacccccccaacacacacacacacacccataacgaacacacacgtacagcagggaacacccacccgcaggcagcccctgaagctgccgggttctgctctccgagactaagagccaccggtgagagagcagcccacgggcacacaggcggacctgtgctcgtcatcacaagggctccacttttggggagactcacccgcacaccgtccgcgcacgcctgaggctgggatcccgcgctgcctcgccggcgatctgtctgaggtttcttcctcttggggtttcttcctgctggtggaccctccgcgaatcccggcctccggagaccgtcctggtaactgccctggccaggactggtctcagcccagactcagacgcacgatcacacagggctcctacttcgccaagtgtcagggacccatccccgggcaacggtggctttcactgtgacccaagcggcggcttgggcctcgcgcatgcgcactggcgaggccgactcccccgctccacccccccttactccgcagagtcaggctgcggaccctttaaaaaatggcggcgacgcggcggctgcggggcctggggcggcggtgctggaggttgcggcggcggcggtggcggcgcagcccgaggcggcgggtgggaagaggactgccagaggggcctgcgggagacccagggtcggacccataggagtcctgtggtgaggacctccttgatcgctcttctgcttcggttcccgcgaaaggaggagcttcgggatgccggctgggctgcgcggactcctcttggggtccgatgatggatccaaccgggtgatcgggaatggggttccaatgcagtgaggccgaaagggtctcgccggggcacagaaagatccccagggcgcaaggcgtgctgtcggctgcaaaggcaccgacccatgagcccactgcctccctccctcctggcaggagcaggggcctgccttcatctccaaggcccgagggctccagcatcccgacgcggcttccggcgacacgggcaaagagagacagaggcgagtccgagctggtgccagcgtgtccacatgtggcactgtcgtcccccaagagcacatgcaggcagcgtgtgtctttgaggccgtagggggcgacgacgagacggacagtgatgtccaggcgtgcgcccggggggccactggagacctgccccacaaagcggaggaaaagccaagcgcacctgaaaacctgcgagacagggcctgtgcgcgagtccacgccacgttcagggaggcccgccagaggagccgagaggtttggacaaagtacaccccacccccagcccgccgccggctaggtacccctgacgcaacctcccctgcacccagccaaaacccagtcccgttggctccctgacatccgtggcagccaaaagattcggtgctagaaggcactttccccaggagcggaggaaccggttggccctcaagaatcagagaggaagtgcaggtgggatgcaacaccgcctttcctagaaggccaatgtcaggagcggtgggcttgcctccgcctcttcctggaccgagcgtgcagccatcacttgggccatggagaccgagagagcttccctgtcccacacaggtatggaagcccagagctccaagatcaccacagctgcccaatcatccagaaagaggtgtggagagggaaacaatcatgacgcggaccgccacgaggtttctccctgatggacggggaagtcttctttgtggaagacactgagccacactaagaagccgccaggcttctcagagacggggcagacacagcaagagggaggtcagagcagacgccagagcacaggcaggatacggggggaccatgccaccaccaccggcatccggggaggagtgtcaaacgggtgactcggccaggaaggccagcctttgagagacagacatgcttgccgccccatccccttgccggcttccttctccgtccctgcgtctagctgtggctacatttctcgatgagggcagagggcgacaggcgtgacaaccaccttcttgaagctctgcgggcaccctcctgcgggtggacaatgagcgcctgggaggccgttgtccttggttggggagcgctcgtctggatccagcctagcaaagaggctgctccggatggggaggggatgaaaaccctgcgggtccgacgcccatgcccacgttgcccaggccttcacagacccccaaactggaaccgccgggacgacgactgccaaccggccacacgacccaggcagagacgcggggacacgctgaccagaagaaaggccgacgtgcaagaaacccaccctccggcgcacagggcccatgtgtcccaaggcgcacgcacacacagacggacagagacagaaagagagggcgaccgaaagagcgagaagggagagagacagagagagagagagagagagagagacgtgagagagagacagaagtcggcacacagacacgcactgcgcgcgcacacacacagacacacacacagacgcatccccccaacacacacacacacacacccataacgaacacacacgtacagcagggaacacccacccgcaggcagcccctgaaggtgccgggttctgctctccgcgactaagagccaccggtgagagagcagcccacgggcacacaggcggacctgtgctcgtcatcacaagggctccacttttggggagactcacccgcacaccgtccgcgcacgcctgaggctgggatgccgcgctgcctcgccggcgatctgtctgagttttcttcctcctggggtttcttcctgctggtggaccctccgcgaatcccggcctccggagaccgtcctggtaaatgccctggccaggactggtctcagcccagactcagacgcacgatcacacagggctcctacttcgccaagtgtcagggacccatccccgggcaacggtggctttcactgtgacccaagcggcggcttgggcctcgcgcatgcgcactggcgaggccgactcccccgctccacccccccttactccgcagagtcaggctgcggaccctttaaaaaatggcggcgacgcggcggctgcggggcctggggcggcggtgctggaggttgcggtggcggcggtggcggcgcagcccgaggcggcgggtgggaagaggactgccagaggggcctgcgggagacccagggtcggacccataggagtcctgtggtgaggacctccttgatcgctcttctgcttcggttcccgctgaaggaggagcttcgggatgccggctgggctgcgcggactcctcttggggtccgatgatggatccaaccgggtgatcgggaatggggttccaatgcagtgaggccgaaagggtctcgccggggcacagaaagatccccagggccgcaaggcgtgctgtcggctgcaaaggcaccgacccatgagcccactgcctccctccctcctggcaggagcaggggcctgccttcatctccaaggcccgagggctccggcatcccgacgcggcttccggcgacacgggcaaagagagacagaggcgagtccgagctggagccagcgtgtccacatgtggcactgtcgtcccccaagagcacatgcaggcagcgtgtgtctttgaggccgtagggggcgacgacgagacggacagtgatgtccaggcgtgcgcccggggggccactggagacctgccccacaaagcggaggaaaagccaagcgcacctgaaaacctgcgagacagggcctgtgcgcgagtccacgccacgttcagggaggcccgccagaggagccgagaggtttggacaaagtacaccccacccccagcccgccgccggctaggtacccctgacgcaacctcccctgcacccagccaaaacccagtcccgttggctccctgacatccgtggcagccaaaagattcggtgctagaaggcactttccccaggagcggaggaaccggttggccctcaagaatcagagaggaagtgcaggtgggatgcaacaccgcctttcctagaaggccaatgtcaggagcggtgggcttgcctccgcctcttcctggaccgagcgtgcagccatcacttgggccatggagaccgagagagcttccctgtcccacacaggtatggaagcccagagctccaggatcaccacagctgcccaatcatccagaaagaggtgtggagagggaaacaatcatgacgcggaccgccacgaggtttctccctgatggacggggaagtcttgtttgtggaagacactgagccacgctaagaagccgccaggcttctcagagacggggcagacacagcaagagggaggtcagagcagaggccagagcccaggcaggatacgggggggccatgccaccaccaccggcatccggggaggagtgtcaaacgggtgactcggccaggaaggccagcctttgagagacagacatgcttgccccatccccttgccggcttccttctccgtccctgcgtcgagctgtggctacatttctcgatgagggcagagggcgacaggcgtgacaaccaccttcttgaagctctgcgggcaccctcctgcgggtggacaatgagcgcctgggaggccgttgtccttggttggggagcgctcgtctggatccagcctagcaaagaggctgctccggatggggaggggatgaaaacccctgcgggttcgacgccgatgcccacgttgcccaggccttcacagacccccaaactggaactgccgggacgacgactgccaaccggccacacgacccaggcagagacgcggggacacgctgaccagaagaaaggccgacgtgcaagaaacccaccctccggcgcacagggcacatgtgtcccaaggcgcacgcacacacagacggacagagacagacagagagggcgacggaaacagcgagaagggagagagagagagagagagacagagagacagagagagacgtgagagagagacagaagtcggcacacagacacgcactgcgcgcgcacacacacagacacacacacagacgcacccccccaacacacacacacacacccataacgaacacacacgtacagcagggaacacccacccgcaggcagcccctgaagctgccgggttctgctctccgagactaagagccaccggtgagagagcagcccacgggcacacaggcggacctgtgctcgtcatcacaagggctccacttttggggagactcacccgcacaccgtccgcgcacgcctgaggctgggatcccgcgctgcctcgccggcgatctgtctgaggtttcttcctcttggggtttcttcctgctggtggaccctccgcgaatcccggcctccggagaccgtcctggtaactgccctggccaggactggtctcagcccagactcagacgcacgatcacacagggctcctacttcgccaagtgtcagggacccatccccgggcaacggtggctttcactgtgacccaagcggcggcttgggcctcgcgcatgcgcactggcgaggccgactcccccgctccacccccccttactccgcagagtcaggctgcggaccctttaaaaaatggcggcgacgcggcggctgcggggcctggggcggcggtgctggaggttgcggcggcggcggtggcggcgcagcccgaggcggcgggtgggaagaggactgccagaggggcctgcgggagacccagggtcggacccataggagtcctgtggtgaggacctccttgatcgctcttctgcttcggttcccgcgaaaggaggagcttcgggatgccggctgggctgcgcggactcctcttggggtccgatgatggatccaaccgggtgatcgggaatggggttccaatgcagtgaggccgaaagggtctcgccggggcacagaaagatccccagggcgcaaggcgtgctgtcggctgcaaaggcaccgacccatgagcccactgcctccctccctcctggcaggagcaggggcctgccttcatctccaaggcccgagggctccagcatcccgacgcggcttccggcgacacgggcaaagagagacagaggcgagtccgagctggtgccagcgtgtccacatgtggcactgtcgtcccccaagagcacatgcaggcagcgtgtgtctttgaggccgtagggggcgacgacgagacggacagtgatgtccaggcgtgcgcccggggggccactggagacctgccccacaaagcggaggaaaagccaagcgcacctgaaaacctgcgagacagggcctgtgcgcgagtccacgccacgttcagggaggcccgccagaggagccgagaggtttggacaaagtacaccccacccccagcccgccgccggctaggtacccctgacgcaacctcccctgcacccagccaaaacccagtcccgttggctccctgacatccgtggcagccaaaagattcggtgctagaaggcactttccccaggagcggaggaaccggttggccctcaagaatcagagaggaagtgcaggtgggatgcaacaccgcctttcctagaaggccaatgtcaggagcggtgggcttgcctccgcctcttcctggaccgagcgtgcagccatcacttgggccatggagaccgagagagcttccctgtcccacacaggtatggaagcccagagctccaggatcaccacagctgcccagtcatccagaaagaggtgtggagagggaaacaatcatgacgcggaccgccacgaggtttctccctgatggacggggaagtcttctttgtggaagacactgagccacgctaagaagccgccaggcttctcagagacggggcagacacagcaagagggaggtcagagcagaggccagagcccaggcaggatacgggggggccatgccaccaccaccggcatccggggaggagtgtcaaacgggtgactcggccaggaaggccagcctttgagagacagacatgcttgccccatccccttgccggcttccttctccgtccctgcgtcgagctgtggctacatttctcgatgagggcagagggcgacaggcgtgacaaccgccttcttgaagctctgcgggcaccctcctgcgggtggacaatgagcgcctgggaggccgttgtccttggttggggagcgctcgtctggatccagcctagcaaagaggctgctccggatggggaggggatgaaaacccctgcgggttcgacgccgatgcccacgttgcccaggccttcacagacccccaaactggaactgccgggacgacgactgccaaccggccacacgacccaggcagagacgcggggagaggctgaccagaagaaaggccgacgtgcaagaaacccaccctccggcgtacagggcacatgtgtcccaaggcgcacgcacacacagacggacagagatagaaagagagggcgacggaaacagcgagaagggagagagagagagagagagagagagagagacagagagagacgtgagagagagacagaagtcggcacacagacacgcactgcgcgcgcacacacacagacacacacacagacgcacccccccaacacacacacacacacccataacgaacacacacgtacagctgggaacacccacccgcaggcagcccctgaagctgccgggttctgctctccgagactaagagccaccggtgagagagcagcccacgggcacacaggcggacctgtgctcgtcatcacaagggctccacttttggggagactcacccgcacaccgtccgcgcacgcctgaggctgggatcccgcgctgcctcgccggcgatctgtctgaggtttcttcctcttggggtttcttcctgctggtggaccctccgcgaatcccggcctccggagaccgtcctggtaactgccctggccaggactggtctcagcccagactcagacgcacgatcacacagggctcctacttcgccaagtgtcagggacccatccccgggcaacggtggctttcactgtgacccaagcggcggcttgggcctcgtgcatgcgcactggcgaggccgactcccccgctccacccccccttactccgcagagtcaggctgcggaccctttaaaaaatggcggcgacgcggcggctgcggggcctggggcggcggtgctggaggttgcggcggcggcggtggcggcgcagcccgaggcggcgggtgggaagaggactgccagaggggcctgcgggagacccagggtcggacccataggagtcctgtggtgaggacctccttgatcgctcttctgcttcggttcccgcgaaaggaggagcttcgggatgccggctgggctgcgcggactcctcttggggtccgatgatggatccaaccgggtgatcgggaatggggttccaatgcagtgaggccgaaagggtctcgccggggcacagaaagatccccagggccgcaaggcgtgctgtcggctgcaaaggcaccgacccatgagcccactgcctccctccctcctggcaggagcaggggcctgccttcatctccaaggcccgagggctccggcatcccgacgcggcttccggcgacacgggcaaagagagacagaggcgagtccgagctggagccagcgtgtccacatgtggcactgtcgtcccccaagagcacatgcaggcagcgtgtgtctttgaggccgtagggggcgacgacgagacggacagtgatgtccaggcgtgcgcccggggggccactggagacctgccccacaaagcggaggaaaagccaagcgcacctgaaaacctgcgagacagggcctgtgcgcgagtccacgccacgttcagggaggcccgccagaggagccgagacgtttggacaaagtacaccccacccccagcccgccgccggctaggtacccctgacgcaacctcccctgcacccagccaaaacccagtcccgttggctccctgacatccgtggcagccaaaagattcggtgctagaaggcactttccccaggagcggaggaaccggttggccctcaagaatcagagaggaagtgcaggtgggatgcaacaccgcctttcctagaaggccaatgtcaggagcggtgggcttgcctccgcctcttcctggaccgagcgtgcagccatcacttgggccatggagaccgagagagcttccctgtcccacacaggtatggaagcccagagctccaggatcaccacagctgcccaatcatccagaaagaggtgtggagagggaaacaatcatgacgcggaccgccacgaggtttctccctgatggacggggaagtcttgtttgtggaagacactgagccacgctaagaagccgccaggcttctcagagacggggcagacacagcaagagggaggtcagagcagaggccagagcccaggcaggatacgggggggccatgccaccaccaccggcatccggggaggagtgtcaaacgggtgactcggccaggaaggccagcctttgagagacagacatgcttgccccatccccttgccggcttccttctccgtccctgcgtcgagctgtggctacatttctcgatgagggcagagggcgacaggcgtgacaaccaccttcttgaagctctgcgggcaccctcctgcgggtggacaatgagcgcctgggaggccgttgtccttggttggggagcgctcgtctggatccagcctagcaaagaggctgctccggatggggaggggatgaaaacccctgcgggttcgacgccgatgcccacgttgcccaggccttcacagacccccaaactggaactgccgggacgacgactgccaaccggccacacgacccaggcagagacgcggggacacgctgaccagaagaaaggccgacgtgcaagaaacccaccctccggcgcacagggcacatgtgtcccaaggcgcacgcacacacagacggacagagacagacagagagggcgacggaaacagcgagaagggagagagagagagagagagagagagagagagagagagagagagagagagaggtgagagagagtcagaagtcggcacacagacacgcactgcgcgcgcacacacacagacacacacacagacgcacccccccaacacacacacacacacccataacgaacacacacgtacagcagggaacacccacccgcaggcagcccctgaagctgccgggttctgctctccgcgactaagagccaccggtgagagagcagcccacgggcacacaggcggacctgtgctcgtcatcacaagggctccacttttggggagactcacccgcacaccgtccgcgcacgcctgaggctgggatgccgcgctgcctcgccggcgatctgtctgagttttcttcctcctggcgtttcttcctgctggtggaccctccgcgaatcccggcctccggaaaccgtcctggtaactgccctgaccaggactggtctcagcccagactcagacgcacgatcacacagggctcctacttcgccaagtgtcagggacccatccccgggcaacggtggctttcactgtgacccaagcggcggcttgggcctcgcgcatgcgcactggcgaggccgactcccccgctccacccccccttactccgcagagtcaggctgcggaccctttaaaaaatggcggcgacgcggcggctgcggggcctggggcggcggtgctggaggttgcggcggcggcggtggcggcgcagcccgaggcggcgggtgggaagaggactgccagaggggcctgcggcagacccagggtcggactcataggagtcctgtggtgaggacctccttgatcgctcttctgcttcggttcccgctgaaggaggagcttcgggatgccggctgggctgcgcggactcctcttggggtccgatgatggatccaaccgggtgatcgggaatggggttccaatgcagtgaggccgaaagggtctcgccggggcacagaaagatccccagggccgcaaggcgtgctgtcggctgcaaaggcaccgacccatgagcccactgcctccctccctcctggcaggagcaggggcctgccttcatctccaaggcccgagggctccggcatcccgacgcggcttccggcgacacgggcaaagagagacagaggcgagtccgagctggtgccagtgtgtccacatgtggcactgtcgtcccccaagagcacatgcaggccgcgtgtgtctttgaggccgtagggggcgacgacgagacggacagtgatgtccaggcgtgcgcccggggggccactggagacctgccccacaaagcggaggaaaagccaagcgcacctgaaaacctgcgagacagggcctgtgcgcgagtccacgccacgttcagggaggcccgccagaggagccgagacgtttggacaaagtacaccccacccccagcccgccgccggctaggtacccctgacgcaacctcccctgcacccagccaaaacccagtcccgttggctccctgacatccgtggcagccaaaagattcggtgctagaaggcactttccccaggagcggaggaaccggttggccctcaagaatcagagaggaagtgcaggtgggatgcaacaccgcctttcctagaaggccaatgtcaggagcggtgggcttgcctccgcctcttcctggaccgagcgtgcagccatcacttgggccatggagaccgagagagcttccctgtcccacacaggtatggaagcccagagctccaagatcaccacagctgcccaatcatccagaaagaggtgtggagagggaaacaatcatgacgcggaccgccacgaggtttctccctgatggacggggaagtcttctttgtggaagacactgagccacactaagaagccgccaggcttctcagagacggggcagacacagcaagagggaggtcagagcagaggccagagcacaggcaggatacggggggaccatgccaccaccaccggcatccggggaggactgtcaaacgggtgactcggccaggaaggccagcctttgagagacagacatgcttgccgccccatccccttgccggcttccttctccgtccctgcgtcgagctgtggctacatttctcgatgagggcagagggcgacaggcgtgacaaccaccttcttgaagctctgcgggcaccctcctgcgggtggacaatgagcgcctgggaggccgttgtccttggttggggagcgctcgtctggatccagcctagcaaagaggctgctccggatggggaggggatgaaaacccctgcgggtccgacgccgatggcgacgttgctcaggccttcacagacccccaaactggaaccgccgggacgacgactgccaactggccacacgacccaggcagagaggcagggagaagctgaccagaaaaagactgaccagaagaaaggctgacatgcaagaaacccagcatgcggcgtacagggcacatgtgtgccaagagtgacgcacagacagatggacaatgacagaaagagagagcgagggaaagagcgagaagggagagagacgtaagagagcgatagaagtgggcagacagacacgtaggcgcgcgcacacatacacacacacacacacacacgcccgtaaggcatagagacctacagcagttaacagccacctccaggcagcccctgaagctgccgggttctgctctccgtgactaccacccaccggtgagagagcagccccaagggcacacaggcagacctgtcctcgacatcacaagggcaccacttttggggagactcaccggcacaccgtccgcgcactcctgaggctggattcccgcgctgcctccccggcgatctgtctgagatttcttgctgctgttgttttttcctggtggtgtaccttccgcgaatcccgggctccggagaccgcggtgttaacttccctggccaggactggtctgaaccccgactctgacgcactatcccacagagctcctactttcccaggtctcagggacccatcccggggcaactgtggcggtccctgtgaccaaagcggcggctcggacctcgcgcatgcgcactggcgaggccgactcccccgccccccttgttactccggagactaaggtcgcggatcctttgcaaaatggcgccgacgctgctgctgctgggagtggggtgtcgacggccgcagcagtgttggaggtatcgtgtggggtgaggaatgggagaggttcctgtgggagacccagggtcggacccataggattcccgtgttcaagacctccttgatctgtcttctgcttcaattcccagtggcggagtagcttcagggcgccggctggcctctccggagtcctcttcggatctgattatggatccgacccggtgatcagtaatggcgttacgatgtagtgaggtgggaaaggtctcgctggggcacagaaagatcccatgggccccaagatgtggtgtctactgaaattacaccgaccagtgagtccactggctccctctttctttggtgaaaccgtggcctgctttaatctttaaggcccagggggtccggaatccctacactgctttgcttgacatgtgcagagagagacagaggcgagtccgagggggagccagtgggaccacaggtggcactggtatcccccaagagcagatggagtgagcttgtgtctccgaggccgtatggagagatgctgagacggacagtggtgtcccgggatgcgcccgcggaccactggagacctcctgcacaaagctgaggaaaagcctagcacaccggaaaacctgcgagacagggcctgtgcccgagtccaagccacattcagggacgcctgccagaggagccgagaggtttcgacaaaatacacctcaccttcacgccgccactgggtaggtaccactgatgctgcctctcctgcacccagcaaaaccctgtcccttttgcttcctgacatccgtggcagccagaagattcagtgcctcaaggcactttccccaggagcagaggagccagatggccttgaagaatcagagaggaaaggcaggtgtgatacaacaccacatttcctagaaggtaataggccagccaccttcgcctcctgctcttcctataccagtcaggcagccatcacttgtgacatggataccaaaggagcttccttgtcccaggcaggtatggaagcccagagctccgggcttcctgcccaatcatccagaaataagtttggagagggaaacaatcatgaaacccatcctcacgaagtttctccctgatggactgagaagtcttctttgttgaagacattcagccaaagaagcctctaggcttctcagaaacagggcagacagagcaagagggaggacagagcagaggccagagcccaggctccatacagcacaatgccaccaccttgggcatgtgtggaggagtgccaaaccggtgatttggccaagaagaccagtattcgagtgcagagatgcttgctacatctcctacctggcgttcttttctttccttgtttccagcagtgtctagatatctcaatgagggcatacggcgagaggagtgagacccatcttctttgaggtcggtgggcacctctcatgcaggtggatattgagcttctgtgagaattttgtcctttgctggagtgtggtcgtcttgatactagcaatgagcccgctcacgatggggagccgatttaatcccctgcgggtccgacgcaactccccacgttgtccaggccgtcacgaacccaaactggaaccaccgggaaaacgaatgataaccggccagatgacccaggcagagacgcggggagaggctcaccagaagaaaggccgtacaagaaactgcccttcagcgcatatgcatccaaacacacacgcacacgagcacacacagacggaaacaggtagagattgatagagaaaggagacagagagaaacaagagaaagaaagagacagaacccagacatactgcagtggcacagtaacattcatccccaggcagcccctgaagcctcagggttctgctttccgcgacaacgaccctggggtgagagagcagcccttgggcatacaagcagacctgtcctcgagatcgcaaaggcacgacttttggggaaactcactggcacaccgttcgcgcaggcctgagcctggaatcctgcggtgcttcccaggcgctcctcctgaggtttcttcctcctggtcgaccctccgcgaatcctggcctccggataccatcctgtcgaccccgtggcgaggactggccttagcccggagttcgacgtgctgccacagaaggctcctccttcgcgaagcgttcaaggactcatctccaggcagcggtggcggtctctgtgacttgagcatccgctgatgattcgcgcatgcgctttggcaaggctgactgcgctctactctgggtcaggctgcagctcctgaaaaaaaattgctggggctgtgtgtgtgaatgggggtgtgcatgtatgtcttcggacgaacgtcccctgttcgctggagggcggtttcttgcacgtcgtcctttttggtgagcctctttctcggtctctgcctgggtcgtgtagccggtcgtgtgaccggaaccggcagtcattttcctggcggctgcacttttagtttctgaaggccttggcgaggtttggtgctgtgtcagacccgcaggcgttcaagtcacctgcccattctgagtggcagaaatcctaaaaatcctccacccaggagcagaggacccggatgtctctcaagaattagaaaggaagtgcagattattgcaaagcacatggtagctaacactggataaatgagatgaacattggtttgctaattacccatatttacgccccagggaaggagggcccagcacaccatatgggataccgtgttgcacttaggaacagagtaatcaggtggaggctataccaggaggctttgtagtagcaagagtatgggaggtaacccctggttcttgaaggagggtgtgattggcctgtttgaataattctgcaggctggctggaacctgacgcccgctactatgcagtaagcaggtaatgtgccggtcctctgagggaagtgattcggctagggcaccttattcaaaggagtacaacagggcaaggaatttgcagttaatccattcaggcctccttgttttccccccaatgtcagggcacatataatattgagccttaatcttaggtcttataccacacttgaccccttgatgtcttgacatctcttggcgatactgatacttctagagtgtagaactgttactggatggaaggtcttgactgtaagttgtccacgtttctggcttgttgaagaaagcattaaacaaactacacgaagcaacaaaagaacgaagccacgaaagaagaaagaagcaacgaaaccgcagatttatttaagcgaaagtccactctacagagccagagccggctagagcaagcggccgaagagcccagattacaatgttctttagagtttttattaagccaaagaatttgataacaccaataagtgccctttcgaggcctccaattggttacacactgtgaaggattggcccatggctgaactcagaggctgaactggagacttctgtgttgttatcacaggagtgaggatgtggcctgtgtgctgcttaacctggcctagaacttgctgcacctgctgttcttttgcttccaccttaacccttagtttatgctaattttctattctcctgcctcagaagtgcctccttaggaggccaagcaggctcttacctgcttcaggtgagcaggtaaccaggagggagcggaccacagttgctatcatgtctatgattagtgtttggaaacctgtgcagagcctttggctccacttggatgggatagccaagagaacagatatgtggtttttggatcatgatatgtctgaatatttgtgtaaccttatgtattaccatcagtttttatttgttaggcatggttattcttgctcgtattattattattattattattattattattattattattattttgatagagtctcactctgttgccaggctggagtgcaatgctgccatattggctcactgcaacctctgcctctcagattcaagcgattctcctgcctcagcctcccaagtagctgggaatacaggcacgtgccaccacacccagctaatttttgtatttttagtagagacggggtttcacggtgttggccaggatgatctcagtctcttgaccttgtgatccacccaacttggccttccaaagtgctgagattacaggcataagccatcatgcccagccaaaaatttttttaataaaataaaatatgtgagtattggccaggtgcagtggcttatgtctgtaatcccagcattttgggaggctgagataggaggatcacttgaggccaggagttcaagaccagcctggacaacacagcaagaccccacctctaaagaaaaaaagtgtgtgtgtgtgtgtgtgtgtgtgtgtgtgtaatatgacataaacaagtgtgggtatatcaatcattgttcaccagttactgatgctgtataacacaccactccaaacttagtagtataagacaaccattttactgtgctcactgattctgtgggttaggcatttagagagctcacagaagagatggtgtgcctctgctcctgatgtctctggcctcaaccaggaggattcaaaagctgggaataacctgatgcctgagggctgcaaacctatgaagcctgctttgcacacatgtctggcacatgcagtgggaggactcaaagactcagactagtagcctccccacatgacttggcttcctcatagcatggcagctcacagcacttggaacttcttacatgatagctcgagacttcaaacacaggagtttcagctaatgaggtgaaggccacagtgcctcttatgactcagccttgggagtcacacagcattggttacaaacaataaacaaatccagattcacgggcagaggagttagactccacccttaaagtgggaattgcaagattctagaacaacatatgagacaagcctattgttgcaaccatctttggagaatacaatctgcagcaatcacctttggagactaggaaaccaatgcagtattctgaaactcgtaattctgaaaactaatgaatatgaatggaaagaatcaagcatttatcctccctttcctacacatgctatccctctaagtaatcagatagttgatgtgtggggattttatttttataaaaggattcctgtaatggaaatttcagtaatggaaataaaaggattccagtaatggctgaaagagagacacaataagaaagtgatcattttgcagctcctaacaacaacgaatctaggcaatgatcatgaatgaatgcatgacattatgcaaaaggcaatcactttacaatggataaatcacattgatgacacttaagcccactaccaaatctaatcacaaaaacagtgacaagcagaccttgccaaaataattgaacttgaatttgaccaagcttctagagcagaatttctcaactctgacactatttacactttggaccagatgattctttgggattggagaaggctgtcctgtaaggtgtatgggatgtttagcagcatcctggcctctagccaataggtggcagcaataccatccttccttgcagttgtgacgaccaaaaatatctccaaacattgccgaatgtcttctagaggtaaaaataaaaacaaacaaacaaaaaacaaaaccacaactggttgagaaccactgctctagttaatgaccagatattttagagaaaatatacagcatctaatttgttaatcagtaccatgggggtgtactcaaaggcagtatgtgggaactctatatgatctagtgtttgatttctccaaaatataaatagcaagaaaaaagggaagtcaatagattaaaagacatataagagccggctgggcgcagtggctcaagcttttaatgccagcactttggaggccgcggcgggcagatcatctgaggtcaggaaaagttcttaaaagaactataagaaaaagagttttaagaaaagttcttaaaagaactatatttcatactgaaatatttatagatgaaatgtctagaattttctctaaaataattgagtgtaaatggagatgaagcaaaactggccatgtgttacttgttaaggctgggttcactgtactaggctctctgcacatataatgctggaagtatccataataaagagcttgaatttaaaaaaaaattacctccttccaagtactactcaaatcagcaagcactaatttggaaggacatccataaggtcttccctagaaacacaagctaaaaaaaaattacatataattctagtaaaggcaaaagggaacaaaagtcactcagtatatgtgtgtgtgcatgtctgagcaaggagagaggtaaaggaaacttaccagacttttaaaatggataaccttggggagttgagaatataaaataacaagaaatatacatatatttgtctctgcccctagctcctggtctagagctccttaaaacccttgggtactaggaggatcatctgttctaatatctggtctttgaccctagttcctgacagagttctcaaatcccttgggatttcctggctgataggaacatcttatgttctaatgaggggacttcttggtgggctcctggatggccaagggatgtgatatgagggttggaattttcagccccaccccttgacctccggggaggggacagcagcttaaggttgagttgactgacaatggccaatgatgtcatcaatcatgcctatgtaatgaagcctccatgaaaatccaaaaggactgggttcagagagcttccagattgctgaacacgtgggggttcctggaggatgatgtgctggggagagagcattgaagcccaatgccacttcccacatattttgccctaggtatttcttcatcgaaaacctttgtaatatcctttttattgcaaaaaaaggatgcaatatcctttttattactctgttacaccgggtcctcttttggactcctctggctggaaggaaagcgtttctctcataatttttgctccctgaacctatcacacagctctgagacttccttccttccaaagccagaagataaagggggaaaataccccagcaaacctgtggtcatcacgtccattcttcacgtttttaactcccttcacatctgcctgctattatttgtatttctgagtcttcaggtggtttctttttgtattcactctggggtgttaagtagaaatcggtgagagagatgctgaaatgtgcttatctcatcttggccagtaatagaagtctgccttgtatatgttattgtatgtatgtgtatatattaagttgtatatacacatattaaatatatatacatatgttatatttatatacccatacatttgtttcctcatgcaatttgtcccagcagaagtaaaaactcataaagatataagtaaaagaatatttacagaagcattatttttggtggcaaaagtactttaatatcctaaatgctcgtataatggaagataatttaactcttacaaagaatgagttagctctttatctactataaaggtatcctaatatctttatccctgaactgataactgtggcagagatcgcgccactgcactcaagcctgggtgacagagcgagactccctctaaaaaacaaacaaaaaaaatagtttgtgggaccaattccaatccagtccaggggagcacacactggcgaccaacatcccccatcaggccccttctgggtcgagagaatgcgcctggaacagactgggaaactccagcaggcaaagtaaggtgccaggaataaagacactgcctgacacattctccatgttccctacacctactcctctccccaccacgcttccatccagctccaattttgccctttccccagtagcctcagattgaaaccttgcaaggaagaagccgattctcaaagtcacaggcttaggaatccgagcaacaaagaaaaatgagcccctgctcccccaactcccccctactcccctcagcactgctgccctgcacctgccccctcctccataatttgaactgtcctcccagaagctggagagacggcccgcctgtcaggaaagaaaggaccagcatgcggcaaatgcctggggtatgtaggagcagacggcgagattagcgcagggatgtaagaaacaagaccaaagaagactccgcggcagacggcacactaggccttcataggggcgtgcgctggacaggacctcgccagttaccgaaagaattgtctgagaaaggctctgatctgacccgaaaggcccttggttcccacggcaacgcctcagcgtctggcagtaacaggctctgtgcccgggctctctggatctgcaggtcccgcctccgccagcctctcacagcccggaggcacctcccattggcgcctgacgggttggttagggcggcttttcttccggctgtgacaaatccagcctgaggagcgctcctgtgtctttcttagttgtttcttcccgcccacctgcccctcaaagccacaacccacttgcacaccaccgtgtggacacctaaaagcgaccgtctagatctgaaccgcgctgagggaatggtcagcttctctcccattagatggcttggcccaaaggacctagcgactgcccagacaaaaatttcttctgacatgctgcatgtgtctgtggtctctaagagtcaaaaccaaagccaaaagaaaaagacaaccccgccccccgcgaaacaacaacaacaacaacaacaacaacaacaaacaccaccaccaacccacctttcacgagaggagtccttgagaagagcctctccagccagaaccaggtaaaggaatctgtgcacttggcgggacccagaacacacagtggcagggacttgacagccacactcttaccccatagaatctccaccactgacacacagatcaggatgtgtcaccctgagagatgacaccacagttctgggctttcacagattgattccacactctctcactgattccacacacatcccattactcacaccagattccctcatcactgaccctacatacctacaatcattgattccatggacctcatcactatcccaaagaccacctatcactaatctacagaccctcccctgtcaccccagggacctcagatttcccatccccgattccaggatgtatagaacctcatctcttacccccacagacctattgataagagaatacactcatgggagactgtgttgaccattttacacatccattgtgtgtgtgtgtgtgtgtgtgtgttgattaatggacttaggtaaactttagcattttggtaggcaatgcagtttttcaatgccttttcattttctttctttttcttgtacatctttaaaggccttactccaggcagtgtgaattgcaatttattaatgcctatcccttattgagtccttgtcatacatatttgttattgatcataattcacaattcttataactcagagacaccaaagactcgcataaaaagaatggatgtgggtttttatttatttatttatttattttggtttctgtagattacaaaagtcattcatttatatcaagtcacgaagtgtatgctttgttttctaaaaaaaattctaattaaaaaaaattttttttagacatggtctccctctttcacccacgatggagtgccgtggtataatcatggccaccacagcctcgacctcttgggctcaagagatcctcccacgttaacctacctagtagctgagaccacaggcatgcaccaatacgcccacctaattattattattttttttatagatatgtgggtctcactatgttgcagagacaggtctcaaactcctgggctcaaatgatactcccaccttggcctcccaaagtgttgagattacaggtgtgagccactgcacccagctgataaaatcttaaaaagagtaaaatactttggcatctaatggaaaatttccactgagatgatgcatcagaaattaaggtagaataagatggtcctagggcatctgaaacaacggaaactcaatcttggactgggtatggtggctcatgcctgcaatctcagaactttgggaggaaaaggtgggggactcacttgaggtcagaagttcgagagcattctagccaacatggtgaaacactgtctctactaaaaatataaaaattagcctggaggttgcagcgagctgagatcgtgccactgcactccagtctgggcaacagagggagactctgtctcaaaaaaaaaaaaaaaaaagaagaagaagtagaataaacaaaatcttaatttattcatcaagtataaaaatgtggactagactctggaggaataatacataaaaagacataggcactatttttttttgaagttttattgagaaatattaataacatatcacagaagccacccattgaaagtgtaaaattcaacggttttcagtatatttgcacagttgtgcaaacagcaccacagtaagttttagatcattttcattaccttgaagtaaaccccatatccctccagttccccccaactcccctaaccccgggccaccactaatctactttctgtttctatgtattggtctattttggatattttatttaaatggaattacacaacatgtggtcttttgtgactggcttctttcacttagcatcatattttcaaggtttattaaatgttgcatgtgcagagggggcactttacataaggataaacctgggagtgggtgcgtactgattttgaaacttcactccaaaattgtaaaagggaaatgattgatttcaaatagaggaaaaacctgttcaagctaaaatcctccgttttcaccagtttgtaatgtggggttttattgcgaagaatggcaaggtttttatacatattttctgcaaattctccctgtgtttgggaacagtcacagaatgtggaggtatgggcttctggactctgtggctggagattcgagtccaggagaactcaagtctcagggtaggcagagaataacagtgcaagagtgccaatggaaccctttgaaatggaaaatttaaaatgttccctcccaaaggagtcccagataaccacacaaaagaggagtttgctgagtcagtccgtcgcgattctccaataggatgcagacagactgggaaagaagaaagtttatttctgcaaccgattacatggagaagggccaagtaactcaccagaccaactcaaagttacaagtttttttctagtgtttatagacatcttaaggtccacggtatgtgtgggactgcacctacaagcagaagtgttgcattcaatcaacatctaatctttaactagggcctagggtctggaaagatttctctagagtcttggaaagtttctgaatcttaagacaggctgaggtgaatgtgtaagaatgctattattattcgatcagactttaggatctgagaagaccaaggcagggtcttaatgggttcgttttcgcattccatccctgatactcaggcaccagtttctccatttcttcaacgtttaacttatgcattcatcaaaattatagtaaagggttagtggaaactgttctggttgctaatggaaacctggcctgccacactgtgatcggaactaaagcccactacagaacactgaaaatgcctgcaaaacactgactttactgacaagtcaattaaattacagaaaagcaagttcacctccctgcccgctctgtcctccggaattgctaggtagaaacgtgcacattgtcctaggttcagttttgcaaagacggagtccgtcagagaaagcatttgtttgatttcatgcatttgtgtttcctttgtccatttcctttatatttatttatttgtttatttatttttttgagacggagtttcgatcctctcgcccaggctggagtgcaatatcgcgatctcggctcactgcaacctccccctcccgggttcaaacgattctcctgcctcagcctcccaagtagctacgattacaggcatgtgccaccacgcccggctaatttttgtttttttagtagagacggagtttcaccatgttgcccaggatggtctcgaactccagagctcaggcaatccacccgcctcggcctcccaaagtgctgggattacaggcgtgagccactgcgcccggcctattttattttaagacggagtctcactcggtcgcccaggctggagcgcaggggcgcgatctcggctcactgcaacctccgcctcccgggttcaagcgattcttgtgcctctgactcctgagtagccgggattacaggcgcccgccaccacgcctggctaatttttgtatttttagtacagacggaggtttcgtcatgttggcggccggactggtctcgaactcctgacctcaagtaatccgcccgcctcggcctcccaaagtgctggaactacaggcgtgagccaccgcgcccggccccatttccttttattttattcttttcagacggagtttcggtcttgccgcccaggctggaggggagtggcgcgatctcggctcactgcaatctccacctcccgggttcaaacgattctcctgcatcagcctccggagtagatgggattacaggcgcacgccaccacgcccggctacatttcctttattttattttttataatttactaacctggttttttttttttttttttttttttgagacggagtctcgctctgtcgctcaggctggagtgcattggcgcgatctctgctcactgcaagctcctcctcccgggttcacgccattctcctgcctcagcctctccgagtagctgggactacaggcgcccgccaccacgcccggctaattttttgtattttcagtagagacggggtttcaccgtggtctcgatctcctgacctcgtgatccgcccgcatccgcctcccaaagtgttgggattacaagcttgagccaccgcgcctggcactagcctgttttttgataacaagactggcggtgcacaaagttgggtctctgtgttcaccgggaggtgggcattggccaggtgggacggtctccagcgcctggtgcaaatctccaccaaagtgcaggaaacagcatcaactattactgcaaagttttggtttggcgcagcgggtagacgttccagcgctgaaatgcgcaagaaagtttttgctgcgcatgtaggcgggtcaggcccaagcgcttcttattggctaatgtggagcgaacctgcacatccattgactgaaagctccgtctatttgaggctaaccgagagcgtcccttccttttgtgttgcctggaaacagactgtccgcctactaacatctgatcgcgtttcccattggtcgccgtttccggaagcccgccctcccgtttccggaagcccggcacaggctgggtctgcagatggcgtccgagtgcacagtggccagtgtgattccgcagtcttgggctgttcggccaagcgcccaccggacgtgggacgctggagggtcagcagcgtggagtcctggccttcagcgtccgcggctgggaaatcggccatcgccacggcgggaactaggactggctgcgtcccggcccttccccatccgtccaccggactcgtgggcgcccgcactgactgtgatgtagtttcctgacctctgacacgtattgtctcaagattaaaggtaaaaacgggactttttcagcccactcgggtaaaatgcccttttatttctaggcaggtgttttgttgcagaacgcctcgaagggagggagtgatcagtaggttgaagtttattaaataaaatacattactagtttatattatgtttataataaagcaccccaacctttaaaaaaaatctcactttttgccagttgtattatttagtggactgtctctgataaggacagccagttaaaatggcattttgttgttgttgctaatcaaaccaatttttagttttggtggttgtcctaacagcagcaacttctcaggctttatgaaatcatatttgttttctttttttttttttttgagacagagtctcgctctgtcgcccaggctggagtgcagtggcgtgatctcgagtcactgcaagctctgtctcctgggttcacgccattctcctgcctcagcctcccgagtagctgggactacaggcgcccgccaccacgtcccgctaattttttgtatttgtagtagagacggggtttcactgtgttagtcaggatggtctctatctcctgacctcgtgatcctcccgcctctgcctcccaaagtgcagggattacaggtgtgagccaccgcgcccagcttataaaatcatatttcttgtggaaaatttctgtgaaaggcacagcgagttagtttggaattgttttaaaggaagtaagttcctggttttgatatcttagtagtagtattttccccaatgtctttgaaatctaatttttggggcacgtatgtagagtaacttttgtgaaagaaacaaccagttaaggaggttttgggatttcctttatgaactataatgctggtttagatttttttttttttttgagacggagtttcgctcttgttgcccaggctggagtgcaatggtgtgatcttggctcactgcaacctccgcctcacgggttcaagctattctcctgcctcagcctcatgagtagctgggattataggcatgcaccatcatgcctggctaattttgtatttttagtagagattgggtttcttcatgttggtcaagctggtttcgaactcccgagcttgggtgatccgcccgcctgggcctcccaaagtgctgggattacaggtgtgctccactgcagccggcatatatatatatatatatatatataataaaaatggtaatgacactatctcctaaatcctttaaaatgttaattggtggatctctgacttttgtagtatttatttcatagtgtgaatgagacacctataggcggcaggtctctatcttcatgaagtgtgaagatttggtgctttataaaatagcccccacattgttcataggccttattcttgattctcagctcccctctgcttctgacattgttactaaaattaagctatgtttttgtggttatgtgagagctgtggaaatgtccagcattagccactaatgtttctccttgatatttctccatatcttaatactgaccctcaatccgttactcagatgggtgtccttttcctggatgtctggaaactaagaccggctatccctctgacctccctgctgaacaaccatttttttcctctctctcttctcttgtctacacttgagttggtaacctcagctctttcatgagcagccttgattcctttgactccctctaactcagagtttattttatttatttatgtttttttgagacggagtctcgctctgtcacccaggctggagtgtagtggtgtgatctcagctcactgcaagctccgcctcctggggtcacgccattctcctgcctcagcctctcccagtagctgggactacaggcacccgccaccacgcccagctaattttttgtattttcagtagagatggggtttcaccgtggtctcgatctcctgacttcgtaatccacccgcctcggcctcccaaagtgctgggattacaagtgtaaaccaccgcacccggccataactctgagtttattacctgcagttccatcagccaagtttagggcccatgagaagggcccatgaatgaaattttcacatacctctagccaaaatatagtgtttccttccatcttgaatacaggctgtagagcccttgggtatggggcattattagcagtcagaccacagcagtttttatgtcatctgacagcatctccaaatagccttcatggttgtcactgcttcccaatgacaattccaaataacagttcccagtgatgatgtgctacttgctattgttacttaatgtgttaaagtggctgttacagacactattactatgtcaggaattacaccaaaatttagtagctcaaaccatcattttattatgtttgtggattctcatgcttatagtcaggatttcagacatggcacaagggtagcccacttgtctctgttccgtgatgtctggcctcagcacagaagactcaacagctggggtctggaaccatctggaggcttgttccttcacatctgatacctggcttgggatgttggaagagggggctcagctgggactgagtccctacatgtagtgtttccatatggccttgacttccttacagcctggtgtggggaaaagaaagagggatcagactgttactgtgtttgtgtagaaagaagtagacataagagactccattttgttctgtactaagaaaaattattctgccttgagatgctgttaatctgtaaccctacccccaaccctgtgctcacagaaacgtactctgttggctcaaggtttaatggatttagggctatgcaggatgtgctttgttaaacaaatgcttgaaggcagcatgcttgttaaaagtcatcaccactccctaatctcaagtacccagagacacaaaacactgtgtaaggccgcagggatctctgcctaggaaagccaggtattgtccaaggtttctccccttgtgatggtctggaatatggccccgtgggaaggaaaagacctgacgttcccccagcccgacacctgtaaagggtccgtggtgaggaggattagtaaaagaggagggcctctgcacttcagataagaggaaggcatctgtctcctgctcgtccctgggcaatggaatgtctctgtgtaaaacccgattaactgctctttaatgcaccaagatttttatgtatgtgcacatcaaagcacagcacctttttcttaaccttgtttatgacacagagatattcacatgttttcctgctgaccctctccccactattaccctattgtcctgccacatccccctctctgagatggtagagataatgatcaataaatactgagggaactcagagaccagtgccagcatgggtcctctgtatgctgagcgccagtcccctgggcccacttttctttctctatactttgtctctgtgtctctttcttttctcagtttcccgtcccacccgacaagaaacaccctcaggtgtggaggggcaggccatccctttcacctggcagcctcagggtagtcagaattcttaggaggcacagggctccaggtcagatgctgagtgatcttttatgaggtagcacagcaaatccacccaggatcggggagagaggacatcgattctgcctctcaaagggaggagtggcaagaaatgttgagccattttttaaaactaccacagcaacatgcctattaatatgtcagaaaaaattaaagcatcctgatagctgcatttctaagtaattggtctcctttgaaattctgtgaattgtgtttttggtagtatatggcattattctgaggaggggtcaaagactctcccgtatgttagaacggtcctgcacagaacaggctaacccccacccacgtcccccagtgtttgaaatgcatagtgtttgctgtggtttattggtcagggcaggagtttctcatttaaattggcctgtaactttttttttggtctgatttccttctgtttgtgctgatattctcacctcaataggaatcaggagcttcttttgctgttcttctgttttggatgcattggaaggtaagtttccttgtgaaccatattttggactcattttgtaggctttgccaaatggcctttttacgctcccattttgcattttctttggatattctcatagattctcagggatattttcatattttactattcatgaatttagaagtgtgtttactttcctgagttttcattttcttctttttcttccgttgtatgtaatttacagagcaaatacccaccagagagaataccgtaagggatgtggaaagtgagtttctttgcgcttatccagtgattgattttcagtcaatgagcattcagtatatgcctgggactctggctttatttattagctttctgatgctgaacccatcagtgaactactctgtatatttgattcatcatgaaatggtgacacccagggtggctgatttccaggtttacatcagttgccccaggggaagtgcctggcccttgtctggttgttgctgctctaactttgccctgttaattgaagaaatgcagctgtaaacacttcctggggtgttgctggcatttactgtcctcacagtttacagggaagcccatattttcagcctcttcctctgctttctgccatttctaaaccatctcacccgatctggtgtaatcttcattgtgtgtgagtttgcacagatgtaatttgggcctacatgtgtccaaagcctaatgcccacctcccacctccacgaaaatctggagctcaggacccactaccctcccccacccactgcaagcttgaacatttgatggtggaaaccccgccctgagtttgtattatggtgggttctcttgggtcttgttctctgtgggtctgtcctgcgttatagtgtgtggagccggggggattttcactgtgttcctaaaggagggtcacaaggagttgttgggcaaacggtctgatatttcctttttttttttgaaacagagtctcactctgtttcccaggctggagttctgtggcaccgtgttggctcactgcaacctccgtctcctgggttcaagcaattctcttgcctcagcctccagagtagctgggattacaggtgcccaccaccacgcctggctaattttttaatatttttagtggagacggggtttcatcgtgttggccaggctggtctcgaactcctgacctcaggtgatccgcccgcctaggcctcccagagtgctgggattacaggtgggcacctggccaaggggctgatatttcttaagggctttccccaagaaggaagaagccaaacctactcaggcaaatcttgtttatttattcttctaggtccagatttggaacaagtctctctagagattgaacaggtaaggctcacctttcaatagttacaccaagaaaggcctagctgatgacttaagctatggttttgggctgcacgagagtggtcaggtggacagtagggaagtctacatgtaacccaaacggaaaagagaaaaggcccctgagaaatcaggggaaagtgccacagtgtctctttcttgatgatgtcactggcatgtgggttaccttcccactgtgtcccccaaaggacatgaggccacaaactgaagtgcccatgaacagaggagctgtggggacggtggtttgatcgctccgttcaaatgcacaccccggtgcatgtgcatctcttctgatgcagggccccagtgggtaagctctgtgcttctccacacagtggatcaggagtggaaacattctgtctgtttagcgcttgatggtttggtggtgacctcatgtcatggtgattagagccaatgatcctaacagtttaaaattgttgagcttgtgggtaggtatttgggagatagtatgtgtgttacctagtgtttgtcatctgcagtggttttgttactttttgcataaactgcggagaacgtttactaactgcagatgatagagaaatcaccagtcactctaaaatcctcccatttcttggtctagagctgcgcctggaacccgccgcagggaggagacctgaagaccagaggaaacacagcaagtaggccctttaaaccactcacctgtgttgtcttctaatttattctgttttattttgtttccatcattttaaggggttaaaatcatcttgttcagacctcagcatataaaatgacccatctgtagacctcaggctccaaccataccccaagagttgtctggtttttttaaaattactgccaggtttcaactgcagatatccctggaaggaatattccagattccctgagtagtttccaggttaaagtcttataggcttcttctgttttgaggaggagttcctgtcagagaaaaacctgattttggatttttagctttaatgcttgtgaaacgctataaaaaataatattctacccctaacattaaagtactgttagtgagaaattaaaattccttcaggaggattaaactgccatttcagttaccctaattccaaacgttttggttgttagaattttctttaatgttcatgaagaagtgttttatattttccatcaagattgaacctctctctcttttttttttttttagacagagtctcgctctgttgcccaggctggagtgtagtatggcgatctctgctcactgcaagctctgccttccgggttcacaccattctcccacctcagcccctggagtagttgggactacaggctcatgctaccacacctggttaattttgtttttgtgtttttagtagaaacggggtttcaccgtgttggccaggatggtctggatctcctgacctcgtgatctgcccacctcagcctctcaaagtgctgggattacaggcctgagccactgtgcccggctgttttttcatttctattatgatttgttctgtggaatgtcagtgacttagcggtatgtttttcacatttttataaagctgaatagttctgtatgtcagctcagcacccctagtgtcagccatgctactctcctgctgtgcatagatgggggcccgtccacacccgaatctcctgggttcccgctgtcagcacccgaaggtacccaccagatgtgtctgtcgcttccctccatccacctctattgtggttctcatgtttctgcctccctagagaccatttctctccagagcagtgctttccaatagaaatacaatgccagacacatacgtcattttagattttctagtagtcactttagaaaagttaaaaagaaacaggtgaaattaatgttttatttcacctaaaatgttagcattatccaaaatatcacttcaacatcttatcaaaataaaaattattaatgaaatcatttactttttttttttttgagacagggtcttgctttgttgcccaggctggaatgcagtggcaccagcatagctcactgcagtctcaaactcctgggctcaagagatcctcctacctcagccttccaggtagtttggactacaggcacacaccaccatgccatgctaattttttttttttaaaggctgggtctcactctgtcagccgggctggagtgcagtagcacaatcttgactcactgcagcctcgatatctggggccgaaatgatcctcccacctcagcctcccaagtagctgggaccacaaacatgtgccaccacgcctgaataatttttgtatttttttgttaagacagggtttcagcatgttgtccaggctggtcttgaactccagagctcaagtgatccacccaccttggcctcccaaagtgctgggattacacgcgtgagccactgcacttggcctgattttttttttctgaagagatgaggtcttgctatgttgcccagaccggtctcaaattcctggctcaagcagtcctcctgtcttggccttccaaagtgctgggattacagatgtgagccaccacactggcccattctttcttttatactgagtattcagaatttttttaaaatgtgttttccacttacagcatttctcaggttggactagccatctttcaagtgctcagcagccacatgtggcaagtgcctgccttattggacagcacagctctggagggtgattttatgtacatccccactgctctctctgcctcctttattcccatctaccccacacccctgcagtctgtgactatcgtgtccctcctctcttcctgtctcttgtaatcctttaatatggagaattatttccaattccttaacatcctgcctgatttttttctgtcttacattcaagggtcacagttttcctctcaccctcatttcagtcttttcccataacatgtgacgtgcctttttgtcttggttgggtatttatttgcaatacaagaatgattgttttctttgatacattagtgactcacatacttttcatgttttttgagtacctctttcttgaaagaatttcaaattctaaagttaaattagaaagctttttttttttttttttttttgagttgtagtctcgctctgtcgcccagactggagtgcagtggcgtgatctcatctcactacaaactctgccttccagattcaagtgattctcctgcctcagcctcccgagtacccgggattacagatgtgcaccaccatgcctggctaatttttgtctttttagtagagccagagttttgccattttggctagcctggtcttgaactcttgacctcaagtgatctgcccgcctcagcctcccaaagtgctgggattacaagggtgggccaccatgcacaacctagacagcttattttattttattattataattttttttttttcgagatgaagtcttgctctgtctcccaggctggagtacaatggcaggtctcggatccctgcaacctctgcctcctgggtccaagcagttctccctgcctcagcctctcgagtagctgggattacaggtgcccaccaccatgcccagctaatttttgtatttttagtagagacagagtttcaccatgttggccaggctggttttgaactcctgacctcaggtgatccgcccacctcggcctcccaaaatgctggtattacaggcatgagccattttccctggccaggaaacttatttcaaaaggtgtgtatagagccccttatgtttctacttgatttttaaatgacaggtctatatgttttaggatgtaatatctcactgtgtgttgctttgcatcattgaacatttttggtaattatttttattttctatatattttagagatttcattaaactaatacggaatttcatattcaggggcaggcatagtggctcatacctgttttcccagcactttgggaggccgaggcgggcagatcacctgaggtcaggggtttgagaccatcctggccaacatggcaaaaccccgtctctactaaaaatacaaaattattcgtgtagtggtgcaggcctgtaatcccagctacttgggaggctgaggcaggagaatcgcttgaacccggaggcagaggttgcagtgagccgtgatcttgccacttcactccagcctggcccacagagcaaaactcctcaaaaaaaaaaaaaaaaaatcatactcgctcgtatcaaaaatgaaaatttatttttacaaatttctatgtgagtgatagaattattttaatgtcagaaaggttcataagaaatgggtgtagtgattgtgttctttcctgtgctcgaatggaaaatgatgagggaacacaatgttagagttgcagtgagaaggggcggaaagaccaggtgcggtggctcatgcctgtaatctcagcactttgggaggccaaggcgggcggatcacctgaggtcaggagttcaagaccagcctgaccaacacggagaaaccccatctttactaaaaatacaaattagctgggtgtggtggtgcatgcgtgtaaccccagctatttgggagactgagacaggagaatcacttgaactgggaggtggagcctgcagtaagccaagatcgcaccattgcactccagcctggttaacaaaagcaaaactctgtctcaaaaaaagaaaaaaagagaaagggtggaaaagagggattccagagtgccaggcacacagattttctggaaggtttacatgaggactgctgtggtttgaatgtgttccccaaagttcatgtgttggaaactcaacccctaatgcaacagtgttgatcagtggaacctttaagaggtgattaggtcatgaaggctctgccctcatgaatggatgaaggtagggtgggttagttatcttgggagggggttcctgataaaaggatgaggttggcttcctccctttctgtctttccccttctccctctcacatgtggtcactctcttgcccttttaccttccagcataggacaacacagcgagaccttcaccagatgcaggcccctcactttcccagtgttcagaaccataaaccaagtgaacccttataaatcacccagtctgtggtattctgttatagcaacacaaacagactaagacagggacactcagtgagctcttctctctacttgatggagcactccctgcgtggtgccttgtatttgtagacatgatgctgtaaatgctctttgagtgtctcgaaggcttttatgtttgaggagtttacagagaagcccgtacagggttcaggtccattctgttgcttctttgctccttagttcctcccctaatctgatgttaaattagatcatagtgtggtccttggaccaatagtatcagtagcacctgaaaatcatgctggaaatacagattcacaggctgctccccagaatactgaagaagaaactctaggagtgagacccaacaatctgtgtttaacaagtccccaggtgagtctgatgcacaaagaaacgtgagctgctgtattagatggtgttgagttcatgccaccgaatcactgacacacacatctgctcactgcttgctcttcgcacaggcccctggatcctcctggaatccctgatccctgttgctcccttgcggagttttctagtccctcttatttgaagcatgtctttcagagcctcgcaccacccagcttgggtatctggtgaattctgtggtctgcatgtccatgtttttgacattctgggaagggtggcccaggctgtgatttgccatctactgctgcaggctatggatggtattcagaagggaggggagatgctgtgtgcgtgttctgaagggtttcccactaaatggagagactgactctctccataagtatttgatttttactttatctcctcgttgacttcacagtgtaagtgcagtttgtctctactgggtgatgcatgcagataaatgtttatgtgaacataagaagtctgcatgtgtgggtgaactctccacatcatgtcatttattgtccatcattacgtatctgtggtgtctagcacattcctctaccttattttctgtcattgtacctacttctacctgaacacgtattaaatatcttattaaaaatacacaaatattatgtttcctcagtggttttttccccctcacattgggccctcctcttcagtggactacagtgtggtacctgcaggtctcaggccttctgggaggttccagcttttcctggatgctctctctctctggccagctcaggctggagcagtgggtgttggtgccatcctgtggctataggtgataaaccaggttgtgttttgacccctagtcttgaatcctggagttctcacatgcgtggatttaaatgctgtgtctttctaagggcagattgtgcccattttccttctctgcctctcaagggactgtttgctgtgtttattgacttaccattaaaaaaaatcatatacattgatgaattagattgtactccataaattatatatgtttgaaaaataaagaatattttttcaatttttttctgatttttacctatcttttaaattgtatatatttatggggtacaaaatgatgttatgatttttccatacagtgtggaatgtttaagtcaaattatcctatccattacctcaaatacttgactttttttggtgatgagaatggtgtttatcactttcactcatcagctcctgatgtcttccatgctagggacaggaaaggctcaacacttgactttccctcctgttttcttagccactgtcaacccttgaatgtaccctccagggttgcctgtcaccttttacacctagcctgatccttgtgcacccactttcctctcagggactgtccttagggagtgactttatgcacagacttaatgtgctcttcctgcctccttcatccccataagcccccatctcagccccatctgattatttcctccctctctcatttcctgttattctgttggttttctaacctgaagggtaactgcttactccttagttttctgccttaatttctaagtcataggctactttcaggctaaaagttttcctccagccatggttttagtctcattctgtaagtcttggtttttagttttattcatttaaaattaatctttaataacttttttgactcattggtgacagagtaattccctctcttcccaccacaccaccctctgtccccaagattctggaagtttgttcttccccttttgtgatcattgttacttaaaactttgagtttttcaaattagaagtttcttctataaatgtatatagagcttggctgggcgtggtggctcacgcctgtaatcccagcgtttgggaggctgaggcgggtggatcacgaggtcaggagatcgagaccatcctggctaacatggtgaaacccgatctctactaaaaatacaaaaaaattagccaggcgaggtggcaggcgcctgtagtcccagctactcgggaggctgagacaggagaatggcgtgaacctgggaggcggagcttgcagtgagccgagatggcaccactgcactccagcctgggcgacagagtgagactctgtctcaaaaaaaaaaaaaaaaaaaagtgtatagagctaataactccttgctttttttttttttttttttgagagtctcgctcttgttgccaaggctggagtgcaatggcacaatcttggctcactgcaacttctgcctcctgggttcaagtgattctcctgcctcaccctcccaagtagctggattacaggcagtggccaccacgcccatgtggggaaaagcaagagagatcagattgttactgtgtctgtgtagaaagaagtagacataggagactccattttgttatgtactaagaaaaattcttctgccttgagattctgttaatctataaccttacccccaaccccgtgctctctgaaacatgtgctgtgtcaactcagagttaaatggattaagggcggtgcaagatgtgctttgttaaacagatgcttgaaggcagcatgctccttaagagtcatcaccactccctaatctcaagtacccagggacacaaaaactgcagaaggccgcagggacctctgcctaggaaagccaggtattgtccaaggtttctccccatgtgatagtctgaaagatggcctcgtgggaagggaaagacctgaccgtcccccagcccgacacccccagcccgacacccgtaaagggtctgtgctgaggaggattagtaaaagaggaaggaatgcctcttgcagttgagacaagaggaaggcatctgtctcctgcccgtccctgggcaatggaatgtctcggtataaaacccgattgtatgctccatctactgagatagggaaaaaccgccttagggctggaggtgggacctgcgggcagcaatactgctttgtaaagcattgagatgtttatgtgtatgcatatctaaaagcacagcacttaatcctttacattgtctatgatgcaaagacctttgttcacgtgtttgtctgctgaccctctccccacaattgtcttgtgaccctgacacatccgcctcttcgagaaacacccacagatgatcaataaatactaagggaactcagaggctggcgggatcctccatatgctgaacgctggttccccgggtccccttatttctttctctatactttgtctctgtgtctttttcttttccaaatctctcgtcccaccttacgagaaacacccacaggtgtgtaggggcaacccacccctacacgcccagctaatttttgtatttttaatagagatggggtttcgcaatgttggccaggctggtctcgaactcccgacctcaggtgatctgcccaccttggcctcccaaagtgctgggattacaggcgtgagccaccatgcctggccaacttcttgctctttttgccactacttttaagctgatatatttggaactgaggtagcctcattctacaggtttagatctgaagtattttaactattgcttcttccagtgtattttctggtttgcaggccagtttcttctttaactcatcagtgacacagtggtttgtatggcttttaatttcaaagaatattttttcaatttgcttttttgttttttgctgatttttatctatgctaattttaactagacatgttcccttgatgggcatgactagattttttcttccccactgcgtttataatttagatggattttcacatctcaagccagttaagagtgtggaaaataggactccttaaagcacagataatgacaagtggttcagatttacaagggtaactcaggtgagagtgtatcattgtacttggcacacagcactgagtaactatcacctttcatttaaatgaatgcagctgtaaatgctttcctagatgtcttgttgatgtttgttaatttctgtagagtttcattctgcccctttcactgtttatcacttgatccttatcacttgagagtccccttattacttgacctgctgttacattatgtttgatttattacaaataccccatcagcctgggtctctctttactccctttgtacacctacatctaaacatagtgatttggattatctcaggatcccacatcctcactgtacccccacccccacccctaccatatctttcttaagttttctagtccctgcttttcatttgtgcttcttaaatcccagccccatgcctgactgtggttcccactgagttctgtgacaagcattctacatttatagatattaaatctttggccgggtcatttacctgggctggaatagggctctcggctgatcctccttcctaaacaccctctcaatgggagaggctgatacccaacatgcaaaccttgttttttacttctccaggcaaagggatgttggaagacattctggagggggtagggtgtgaagatttacaaataatctttgaatatctgcttcatgataggtcttggaggtgccttgtgggtgtggctttggagggatggttacgaggaaattgtggatattaaggaagtcaggaaaggaaaagatgactcactgacaattcaacaattgtcctaagggactttctggctgcttgatgccctagaagccaggccctcacttctgtaaatgctggggactgtggatacagaatttaaagggtcaccaaaaaaactcagtaatcaagataaacaatattttaatgtaatatctttaaaaataaaatcaatgcaaaaagaaaacacccctgttgaacaaaacggtcagacttatgcctcctttccaacaccgccccacctccaccccaccctccggaagtttcctccaagccgcacctgtaccccagcctccaataaaaacctcgggaatttcctgatcaagcttcggatccccaccaccaccaggggatcttttgctgttcaccccaagttcagtctgcatcccctaaaatcctagggacacgcgaccagtctcccccatctgcattccgggagtttgccccaaaccaatcctgctctccgcgaaaatagccttggggttccctgtcctggtacaccctcctactctaggggacaaagggccggtgtcgcctccaaactggtggttcccgcagagcatcgtctctccctgagccgcgtctgtcccgacctggcacctgctcagggaagggcgcatcagggcggagacttgcgtagtgagctcagctcacccgcaccttgaaggtcagcgcacactggccacccgcagagcaccgggaccacattttgcagaatccttcggcagtcccgcgatgccttcgcggtcagcagatctcattggtttacagagaaacttgtcaacgtcacttgggcatcttaagagtgggttcgtaaacttggttgtgtgcgctgtgcagatgtcagtcaccctgtgtggtgggcaaagccgacttctccgcctctgtagctccgaaactacaatccccagaggcctctgcggtcacttccgctcccctccctacccttcagtgtgtagcgttgacgtcagaaacacttccggtcggtggcccaggcgcgttaagctggttgggacccgggaaggcctccctcttaaggtctttcccacacctctgcaccttgttacctgactttcggcttcaggatccgcagcgtgcacccgcgttccgtgagtgccctataggcagtcagcatgcccctctgcgtgtccctgtgttacggggacgccggctgggagccgcagagctatctcagaactagggcgctctcctttgggcacctccaggccattttcctttcattcgagcccacagggttagagataaaccctcactccgttgcttggggacaagggcttcactccctgtcccgagcttgcggctgagcttgagggtggctgggtcatcctggccccccactggatgggaattggctgctctggtgatttctgtgacatcccagaccccaactgtggggctctggagcggactgcgcttcacttcgtggggagggtgtttccacctaggccactcttatttctcttcacatccccagatctgtcttctgagactttgcccttctccaggaagagcactcaggagaccaggaaaatggccacagggctcctgagagccaaaaaagaggtgagaattaactgtaattctatcttggctgtcaacagaatgggtcccattaccttttcttgtcctggaggctgccttgttggtattgggcaaagtcattcctagccctagtcattcctagtccatagaacaaggaggattttgatatagtcttgtagagcgtccgattctgtcgctgttcagggcgccacttgtaacctgcacggacctggtggactgaacaaaaggaataaaagacaagaaacaaaaaagtatatttggaagaaggggtcgggggcactttgtctctagtggacaagggccctgagctttacacaaccctcccgtatttattggtaaaacagataacaagttagggggtggtgattgtcaggtaattgtcagttggccgtttggttcgcaattgcaagactgcatccttccaacaataggcgctagatttcctggtagatcacttcaaggagccaggcgccaggcagtgatggctctcagcacatcttttggtggcagtgtgcgtttgctcacatcctgcattcatgataaacagtttaccgtttaatcatataacctccagtggaatgctgagttggtcacaatccctttggtcttttcggctccaaacatagtctgacctgaattttacctttgagttcattcctagtcctggaagagtgcctcgttctaacaggagtcttccctcagcattcctttctgctccatccttaccgcagtcactcatgaagtagttaattgtgaacaacacatatggagcagtttaaataaaagtaaagagacatacatgcgtaattgttcagtgatgtggatgaagggcagggacagcacagatgcctgtgatttcaaatggttagggaggcctcctagaagtagggctgtctcaattgcccctgactggtttgttaagttggagattggggggaaggcattccagtgggaggcggcaaggaagcatagatagtttcagaggctggactctcagtgtggaaggattatggtggccagtggacttgcttaagattgaattttttttttttttttttttgagaccgagtctcactctgtcatccaggctggagtgcagtggcgccatctcggctcgctgcagactctgcctcccaggttcacaccattcttctgcctcagcctcctgagtagctgggactacaggcgcttgccaccatgccaggctaattttttgtatttttagtagagacggggtttcaccgtgtcagccaggatggtctcgatctcctgacctcatgatccacccacctcggcctcccaaagtgctgggattacaagtgagattacaccacacccggctacctatgcatatttaaaaatcaaccttggccaggcgtggtggctcaggcctgtaatcccagcactgtgggaggctgaggcaggcgaatcacgaggtcaggagatggagaccatcctggctgacacggtgaaaccctgtctctactaaaaatacaagaaattagctgggcatggtggcaagcgcctgtagtcccagctactcgggaggctgaggcaggagaatcgcttgaacctgggaagcgggggttgcagtgagctgagatcgcaccactgcactccagcccgggcaacagagtgagactccatctcaaaataaataaataaataaatatacatatgttaagatacagactatctattcacacatagaacaaggagaatttcgatatagtctgacctgaattttacatttgagagcactttcagcttctggcaattgggacatttccaaaattccagattccctgcttctctgaaaataaatctgccctaaatctgcactgttctttggtgtcagacaatttgagctgaacaacgtctttatcatttggacgtgaccttcagagtatcagctgcactttctgcagtgtcctttatactgaggttgaaaccattgactacctaacatttcacccccctctcatttttattacctacctgacccctgaagggtttgccttttccacctctcggtcagggtggggacaaatcagaaaatgctgagtgccaggctgagcagggtagactttgtctttgagtaagctgagttttgaaggatgttaagaagggacttgacataaggaagtcaatggtatgtgggaaatagtgattgactgtgtataaggacttaaggggaagcgttcttcttttttttgaaacggattctcggtctgtcttccgggctggtgcgatctcagctcactgcaccctctgcctcccaggttcaaacgattctcctgtcccagcctcccgagtagctgggattacaggtggcgccaccaggcccagctaatcttttgtatctttagtagagacgggatttcaccatgtttgccaggctggtcttgaactcctgacctggtggtccgcctgcctcggcctcctaaagtgctgggattacaggtgtgagccacagcccccggccgaggggaagcttttctaagccctgagattggtgacgatgatgcccctgacttaattgaatgcaattaacattcattaagcaccaacacagttgccaggctgtttaacagtcatttttgatatgggttaacttggttatttcagatttgccttgactatccttatcaagaaatctgagtggaatttagacaggaaaagagatttcttaattctggactccagtggtggggattatgcattcctggatgttatcagagcaacactgagaattctgtttctcatttctaaaatagttaattcatttgagagtgttaataccaggaatacataagaaatccaattcaggacatttcccaaggtaacattgaatattttttgtgcgtactttctcttttctttgaggcggagtcatgctctgtcacccaggctgcagtgcagtggcacgatcttggcttactgcagtctccgcctcctgggttcaagcgattctcctgcctcagcctcccgagtagctgggattacaggtgcatgccaccacgcccggctaatttttatgtttttagtagagatggggtttcgccatgttggccaggctggtttcaaactcctgacctcaggtgttccacccacctctgcctcccaaagtgctgggattacaggtgtgagccactgcacccagcctttttgtgtgtactttcttcaccactcccagtgttaccagggaagcattctttctgattggctgggaaaagtcagaagtttgtggtagctgacttttcctgtgccacctccttcattctcagtaggtctacccggaactgcctcctgtatataaacaacttgttcttcaatgtagctttttaacatagtatttactcaggaaaaattaaagggcatgagcatttaaatagttgtttaagatgaaacctctgtgtctctcatgcctagcacacatgaaatgtttggtgcatgaaggaatcacaaccttaagtaaacgatttgaaggaactaagtaacaaaggagtttctgttgtttgctttggtttgttattttgggcatgtggttaatcacatgtttcaggagcgttgggtagaatttccagatactcttgatatgcatggcatctgaattatacaaaataatcaaagcaagactatcttaggacattaggtattactgccaaggacctttgcctgagaggataaattaaaatttgtgttaaatttgtaacaatgagatgaactggcaggcacattatgttattttttttcttagcatttttccttttccttggtgccatacaacaaacttgagtgtctgctatgtgcagaacactcagtagattacagttaatgatgggtaaaacacagtctgcacactcaggagtcttccattttattttaggattcctttctcatttggatttaatttaattttatatgcgctcacacccctgcaaacatattttgacaggccctaatggtaaaatcataatggagtaaagttactggcagtgtatctacccagctctatttttaaaggtgtagaaacagccaacacttatcccactgaaaataatttccatagtaatccattgaatggatgaactcatccattgtttcccaatttttggactcctgtttccaatgtttaactgttgcaaataatacttctatgatcagctttgtacatgaaattcttatataggtttttattctcatacaaaatatgacaaggtgaatagacatgactgttttgaagcattgggcacccacagcagttggagatttgaaccctgccagttttttttttttttttttttgagacagagtctcgctctgtcactctgtcccactgcatcaggctgggatgcagtggtgcaatcgatctcgcctcactgcaacctctgcctcccaggttcgagcaattctcttgcctcagcctcttgagtagctgggattacaggtgcccgccaccacaccaggctaatttttgtatttttagtagagacagggtttcaccatattggccaggctggtctcaaactcctgacctcaagtgacccacctgccttggcctcccaaagtgctggaattacaggcatgagcaccgcggctggccctgaaccctgccagttctaaagaatttgaacttccaattacttctttcttttctgagactcccttcttcaccatgtgtttctttatactgtgcaatttttattttattttattcatttattattattattatttttgagatggagtttcattcttgttgcccaggctggagtgcaatggcatgatctcagctcactgcaacctccgcctcccaggttcaagtgattctcctgcctcagcctcccaagtagctggaattacaggcatgtgccaccgtgcccagttcattttgtatttttagtagagatggggtttcaccatgttggtcagattggtcttgaactcctgacctctggtgaactacccgcctcggcctcccaaagtgctgggattacaggtgtgagccaccacgcccagccctactgtacaacttttatttgcttttattttaattattacactgtgcagattttgattaccggggtagacctgccaacttaggtctctttcttctctcacatgaaagctcacatagtatcctgatttgtttccaaatgttgacatggtcctttgccacccactacatgtttctgtaatcctcgttttccccaacattgcagtaacatcacttttcagaaacctttagtgcctcatttcagtgtcttagatatttaggacagtcttcatttcaaatattgtatcctgttgtctgatgtcatgttctgattattcagtctgaaagtgtgtttattgttaccacaggggagtcatcttatgtgtacttttttttttttttttttttttgagacggagtctggccctgtcgcccaggctggagtgcagtgtcacgatctcagctcactgcaagctccgcctcctgggttcacgccattctcctgcctcagcctcccgagtagctgggactacaggtgccgaccaccacgcccggctaattttttgtattgttagtagagacggggtgtcaccttgtcagccaggatggtctcgatctcctgacctcatgatctatccacctcggcctcccaaagtcctgggattacaggcgtgagccaccgcgtctggccttgtgtacttttaacttagatacatttactttttatccactcagctgaaaaaagaggagaaaaataaaagtaggtcaggtcaatctgtttcctttcccatttaatgaattcatgcccaggagtgagtgagaaatgggaggactgaatctgctgttctccaagactagcttaggagtttctgacatcatgggcatcccagcaagccaacggtcacattagtcaccacgtatttttcatatcacgtgatccctctatcagtgtatcagcctttgctgtataatgaacaatcctaaacatcaatggcttaaaacaaaatcacttattagcacataatttggtaggttcatattttgggctggccgcaggtaggttttgcagatttcacctggtcttgtcattttgctgcagtcggctggcattttgaccagggctggaggactatccatgtgtgacaggaagctggttggctggggtgcctagtttcttcttggttctcttccatgtgggcttgggcttggtcaaatggtcttgggtttctctatgcaggaagagaggacagccccaattaacaagtagttttaacgttttggcttttgtcatgttcactgatgtccttttggccaaaggaagtcacatggccaagtccagagtcgtcatagaacgggataacataagggagtagatacagggagacatgatttattggtcccaatgattcatacccttaccatgtgcaagattaactcacccccctcccaagatccccaaaagtttcatcttgattcaaaagtccagtatcttatgtgtaacagtctggatgtagctaaagcttcttcactggatcctttttgagtcagatacctgtatactaaaaaggcaagtcatttgtttccctccaccccaaacattccctacctaacatacagtggtgagagagagatactgcagtagatgctcccattcagaaaggacaggaattaagcatagaggaggcctctccattttgaactgtttcagatcctttggacttccttgaaagctctatgggtttcccatgtaccagatttgggactgctctattaaacaaaagctgaaatcacagtcagacaggcctcacatctttggcaaggtgtcggtgctatgggacaatgcccataagaatctcagaagcctttttgtccagcgtggagactccactaggcatccccttaacacttcagaggttctaaagtttgggtcttttagccaaacttttgattcgaactttactctgagtttatttttttattttgagacatgtgctggctggagagactgaagatgtaaaataattttatttccaagctagcaagtcctgacttgtctatatttcctctgaattacgcttgcaagctgtataattgcttcttcagctcttctgtttctggacattattatatgtcactagaaacatccaactgaattttttttttttttttttttgagatgaagtttcactcttgttgcccaggctggagtgcaatggagcgatatcggctcactgcaacctccacctcccaggttcaagcaattctcctgcctcagcctcccgagtagctgggattacaggcatgcgccaccacacctgggtaattttgtatttttagtagagacggggtttctccatgttggtcaggctggtctcaaactcccaaccttgggtgatgcgcctgcctcggcctcccaaagtgttgggattacaaatgtgagccaccacgcctggcccaagtgaaacttttaacaggctttttggagatctctttagctagatccaaaaattcatcaggtatattttctgttttccaagttcatgcaggcaatagctttgctaatatataatactagttgccttgttcaagctgccatatcagtttcatcactcctttcccagtccccactagcagtttgtttactggttttccagcctgtgctaatagttttcctggatgctttccaagcctctgcccatgtcctgctcccaaagctaatgccacatgttttaggtattttgttatggcagcacttcacttctgtgtaccaacttagtggcctaaagaacatagcggcttaggcctggtacagtggctctcacctgtaatcccaacactttgggaggccgaggcgggcggatcatgaggtcaggagttcgagaccagcctggccaacatagtgaaaccccgtctctactaaaaatacaaaaattagccgggtgtggtggtacacacctgtagtcccagctacttgggaggctgaggcgggagcaggagaatcgcttgaacccaggaggcagaggttgcagtgagccgagaccacgtcattgcactccagcctaggtgtcagagtgagactatctccaaaaaataaagaataaataaaataaaaccaaaaaaaaaaaaaaaccaaacaaacttagcagcttaaaatgaaatcattttttcaaaatcctgtgggtcagcaagtaggcccggcatggctgagctgatcctcttggcatcctcatgtggctgtagttagctggctgctcagctacagctggatggtctcaacctgtctggtggttgacagcttggttggctgggatgcttcaattcctggttcttctccatgtggcctcttcagcaggcaagctcaggttattcacatggtggtctcaaggtttcttgcacagcgagaaggccagccctgaactcagatgcctctcaaacatctgcttgcatcatgtttgctggtgtcccactggataaagcaggtcccatggccaagcccagggttaatttaggaggagactgcatgaagggtagaaacagggaggcatgattcactggggccatcactgtacccatccactggttagatacaatgcttttggccgcaagcaacagtaaacctaatttaggctgttctaaacaataagtaacttagcctatataaaaagaagttcacagagagagtgcactttggggttggtccttcagctccataagcttcccaaggactggggtgctttcatctctgcagtctaccctgttctctacagtgtcagcctcatccaggctggttcccctcaaagccataggatgtctgccaatagcaactttgtttaattctcacaatggccccataaggtaagtactattataatatcgattttataggaaattgagacacagatattaagatatcaacgcaaagtcataggggagggaggagagaggggactgtaatttgaacacagtttgtctccagagtttgtgcttttagccactgagtagttgttaaactttagtgtgcatcagaattacttggaagccttgttcaaacattgctgggctccccccgcaatttctgattcagtagccctaggatggggactgagaatttttatttctaacaagttcccaggggatgctggtgctgcaggttcagggaacacacattgagccagtgcactaagccctgctgcctcttttgggtaatctgtgcccatgtttctgagcatcaggaaaagtgcttaattcctgtgactccatcttacaaatgacgaagtcttttgctagaatcctacggtaaggcttcttgtggcctgttggttaccattcatttttcatatatttatttttcagctggcaagcagatgaattaactcccccaagcttctagctgtgtttctactcagtgggagagatttggagtgaatcatgagggtcaaccacacagtgtctacaatgctccctacatgcatggttcacagacaaaccatgagttgttccggggctggaggaataacggttgtattaaatgtgttaaagtaacactaattgctctgtgatgtagctccttcgtgggagattttcaaggggtgtatgtgtgtatgttctgagaaggggttgtaaaagcaaatcacaacagggactaggcagatacctgaatagcctttttctctccagtgtttaatgatgaacagtttcagacatatggaaaaaaccaggaagccttgtacattgaacactcacatacccatcacctagattctcagtgagtacctccttctcatgaacttttcctgatcctcaatcctacagtgacctctccctcttgagattactctgacccagtgattcacaaccatcacactacttttaggagcctttgaaagtacaaaagccccatcccctggttttacggatttgtggtgggactcaagaatccataatttaaaacaccacccaggtagctctaaaatatagccagagagagatgaggtatgagaaccaaagccctcactcatctgtgctcttctcttgcgattaagtacattgggactggctgggtttggggacagctatcgatataactgagtgtaggtagagtcttaaggccatttcatagtccagccagtgtagaatagtggagctggtaggggacaggaaatgtagggaggattccctgggaagggtacagtgtggaattagttttagagacacaatgtcataccctcaaggagtgatggaggcattctgagaaggggatgcaaaatcaaagagacaaggcatgtacctaaatgaatgacgctggtgaggcagtctccaatagtgtgttgcggctgatagacccccagcatgagtcaccgtcagccaactgtggtcctacagcagtgcaaagcccagggtggtcagatttatggatttttaacataacccatagattgagattttcatatgaaatcttccaacatttaattgatataaacacaagttttaaagcagtatatgggtcaaattaaacccctctatggactgcagattgtacctaaagagaataagtgttgggcagggaagaatcccagtgctagatttccagactcatttggaaatctcaccgaacttccatgccaaggacggttatatattcccatcctccaaagtacagctttctaggtagcagaggttcgtttgaaactttgttgcttgtctaataataataaatcatttttggttatttaaaaatatttgactgctaagtgtttgcagattctgttgtagacaccagggcaatcacagtgatccagccatgcacatggaactgatgtcttagtgggaagtcagaaaatagaaatgaatataatgtattatcttagagttaaggcaacacaataaagcaggagaggggaatgaaacccgcatgagagcatggaattttacatagaacggccagggactgcactgggcattttgtctgagcccttcacagtaatcctaatcctcaccacaagctgtgagataagcactgttatttttagttcgcaggagaaactgacgtgctgagcagctaattcagtgcctgaggttacactagttgtggacagagatgggttccaaatccagatagtatgggttgaatccacgctcttcatcaccacccactttccctccttaggcctgagcaggcacgtggcagcatttggtagaggaaggagtgagccctgctgtaggaactatatatattggtgagttatttgcccccaagccccagaggcaccactgcttcaagtagaacaaatagtgagaccaagtagtctcagaaaattttcaaactcagcaagataattctttactatttagttgtacttgtgtggtgtcttcttctccctgcctagttttgaaacgccctctaggtaagggctttggttttgtttgctcttatcctccctagcagctagcctgggatattgacagtaagtaacaggtgcataaatgatgctggctcggcagagataggagaataatggtctttcactccttggtgccaaggtcacaatccaaagtagggtctagaaatctttcctacttccctcagggaagccttttgacctctcattctttttttttttttttgagacagagttttgctcttgttgcccaggctggagtgcaatggcgcaatctcggcttaccgcaagtaactgggattacaggcatgcgccaccacacctgactaattttgtatttttagtagagacggggtttctccatattggtcaggctgatctcaaactctcgacctcaggtgatccgcccaccttggcctcccaaagtgctgggattacaggcatgaaccaccgggcctggccttgacctctcattctaaagtgtgggagggaaagacaggctcctgggtgagcagaggtgtgttttgtgttaaaggcgttcgtggcattcagggatgtggctgtgtacttcacccaggaggagtggaggttgttgagccctgctcagaggaccctgcacagggaggtgatgctggagacttataaccatctggtctcactgggtaagaatggcctcccttggcacttaaaatctgccctacagagtattttccactcatcgtgaggaagggctacctgcagagcacctttcccttagagttgagcttgaaaacaatttacttttttcctctgggtaaatctggatttagtagaattgaaagcagacagattgatttattcatgttatggatgacactacatttccaggcctgtttcccaaggcttgtgctctctctttattttgcttcaaacccaggaaatttttcatacaccaagtgttcataatatgccatctttctgactggagtcacctttccttagtcaacccttctacttcagagagagaactattcataggtcttttttatcctctgggtttcctcacccatttcagctctgagttctagaatgccctcttgagcccataaccaacaatgtcctcattttcttccctatgaacagaaattccatcttctaaaccaaaactcattgctcagctggagcgaggggaagcgccctggagagaggagagaaaatgtccactggacctctgtccaggtgagtgttgagtgtggggtagacgggataatccacagcttggcagataggaaggaggaggcatctctcagatactgggaagaagctcttcttcaggcctcctaagccaagagaaacgttgcctgacatggtcttctttccggaacataatcttcagttgagggagggacttccctggttcccttgtctcttccctacaccaggaagcctcccttcctcatttgtcttctccgtaatgcttagtctttcctcattcactgtcttctttctcacctgatcttaaaaattgcatctacccatgaatgttaagtctacgacacttctagatactttctagctactcttatgctaagattaattgattaactccacctctccaattcccataacttattacacaatacttaagctatgactaataataaaatacatactcatgtgccaatgtcccagcttaagaaataaaaaatgacctaaacagtcgaaacccctatttccccttccctgatggtatcctctacccatccctccaatggaattgtttttcagtattagggatttgtaattctcatgcatggctttatcatttccttcatatgtatgaatcgctaaatcatctatattgttgtttggcatattttaaaactttatatcaatgtcatcatattatgtatgtattttgttttcttccctgagactaattttgtactatgttggtatatgtagctctgcttcattcatttttgtggctatataatattgtattttatgcataattataatacaattcatttatccattccatttttgttggacagttacagttctaacagtgtattcttttgacccactaaagaatgttgctgtgaaccttctcatagatatgtccttgggcacataagcacccgtttatctaggatatgtacctaggaataggacagctgagtaaaagaatatgcacctggtcagtctgacaaggtaatgccaaactattctccaaagttgttgtattagtgttctagggctgccacaacaaagtaccacaaactgagtggcttaaacaacagaagtttattttctcacagttctggaggctagaagtagagatgaaggtgttggtagggttggttccttttgagggttgtgaggaagaatctgtcccatgcctctcctctagcttctggaggtttgctggcaatccatggcgtggaggagcagagtcccagtctctgccttcatcttcatatagcattctccctgtgtgtgtgtctctgtgtccaaattttccttgtttgtaaggacattattcatactggattaggacccactctaatgacctcatcttaactaattacatctgcaacaaccctgtttccaaataagttcatcttttgagatattaggggtttggactccaatatgtcattttttggggaaacagaactcaacctatagcaattgcttacactcacatagcattttattgtttgaggattctagttgccctacatccttcctaatactttgtgtggtcagactttaggttttgatcatcttttgggtatgaaatggcctctcatagtagttgtaatttgattagttttgagtttgagcatctttttatatgttcattccttgactggccttggtgtttgctcttctgtgaagccttttcaattcttttgcttttcttcttgttgatttgaatttgaatttttaaaaataaatcattgaggtgaactctttatcagatgttccaatctgtggcctacctccttgctttttttatttttttttattgagatggagtcttgctctgtcacccagccaggagtgcagtggcatgatctcagctcacagcaacctctgcctcccaggttcaagcgatcctgctgtctcagcctcctgaatagcggggactacaggcgtgtgccaccatgcctggctggtttttgtatttttagtagagacggggtttcaccatgttggccaggctggtcttgaactgctgacctgaagtgatccacctgccttggtctcccaaaatgctgggattacagacgtgagccaccacgcccggcccccactggcctttttttttttttttttttaatacagagtctcgctttgttgccaggctggagtgcaaaggcgcaatctcggctcactgcaacctccgcctatcaggttcaaggattacagacgtgagccaccacgcccggcccccactggccttttttttttttttttttttttttaatacagagtctcgctctgttgccaggctggagtgcaaaggcgcaatctcggctcactgcaacctccgcctatcaggttcaagcaattctcctgcctcagcctcccgagtagctgggactacatgcatgccaccacgcccggctaacttttttgtatttttagtgttagccaggatggtctccatctcctgacctcatgatccgcccacctcagcctcccaaagtgctgggattacaggcgtgagccactttacctgatgccctgcttgctatttaaacaaactgtgaaataatttgtctcaatttataaaaataatacagagagtttccatttactcttcaccctgctttccccaatgataatatcttatataaccacagtacatttcaaaaccaggtaactgacattggtacagtactattgagtaaactaaagactttattcagattcagatttcatcagtttttgcatgtactcttttttttaattgttgctctatagtagtatgaaatttcattacataaataagatttatgtagccaccatcaccacaataaagatgtagaactcttctatcactacaaagaaaactctcctgtgctatcttccctccaatcttaacccctggcaactactgatctgttccccatcactataattctttttgcttttttttttttttttttttttgagacagaattttgttcttgtcccccaggctggagtgcagtggtgcaatcccagctcactgcaacctcggcctactggactcaagcgattctcctgcctcagcctcctgagtagctgggactacaggcatgtgccaccatgcctggctaattttgtatttttagtagagacggggtttcaccatgttggccaacctagtctcgaactcctgacctcaggtgatccacccacctcggcctcccaaagtgctgggattacaggcgtgaaccacttgtgcccagcctcaaattttatttctactaaaatatataattattcttatgctacatttcttcatgtgtcagtctttttaaatttgtgtattttaattaatttgtccacttaacctcagcagttaaatttgttggcataatgttcataatattcccaaatttctttaaaagtgtgtatatttctctagtggtgcttcctctttcattccccatattgtgatttaaaacattttgggggtattttatctaaaggtttattaattttatggatttttgcaaagagtcaacttttggtttcattgattttctgtagtattaatctatatcccatttaagtgatttttatttgtatctttttctgcattctactttctttgggtttaatttcctcttcttcttacttcctgaggtagaagcttaggtcattggtatagaccttcttttctaatacaatcacatatatatctgtacatttatttctaagccttgctttagctgaatcctacaacttttggtgtgttgtgttttctttatcatttagttcatgatattttctaattttcttattttttaacctattggttgtttagaagtgagctgcttaatttccagatattcaggtattttctaaatgttttatttttattggttttcaatttaattgtattttgttgagagaatgtattctgtatattttcaatctttcaaagtctgttgagattaattttatggcacagcatatgatctatttttgtgaacatcctatgagctcttaaaaggaatgtgtattctgcagttgttgagggtactatcctataaatgtcagataggtcatattggtaatatttttcagatgattgatatccttactgagtttttgatcttatttttctatccattactgcaaaggtgtgttaacatatcattgtggatttgtctatgtctctgtagtgatctctaaggttttgattcatacagttagtaattttgctatgaggcacatgtacattaataattgttacgtcttcttattgacctttttatcattatggaatttcctcctttgttttttagcaataccgcttgtcttcaggtctgttatctgatattaatatagctactccaggcttttttttttttgagacagagttttgcttttgttgcccaggctggagtgcagtggcactttctcgggcgtggcttggagatgccacgaccaaacacctcttaaaggcctcctggcttcaagtgattctcctgcttcagcctcctgagtagctgggattacaggtgcccactaccacgcctggctaatttttttcctatttttagtagagacaggatttcaccatgttggccaggctggtctcgaactcctggcctcaggtgatccacctgcctctgcctcccaaagtgctgggattacagacgtgagccaccatgtctggcccattccagctttttaatatttactctttccgtggcatacctttgtccattctttatatttcaatctttttatttgcgtctttgtatttaaaatgagtctcttatagacagcatatagttgatttttttcttctttatccagtttgccaatctctacgttttgttggagtattgaatgcattagcactcaaatgttattgttgataagtaaggttatttctacttttgccagatttttctttgttttctccaatgtgtttttacttgctctgttttctttagcctacttttgttttaatgttttaataaaatactttttagattcttttttcttttttttttttttttttgagacatagtctcactctgtcaccgagactggagtgcagtggtgagatcttggctcagtcatcctctgcctcctgggttcaagggattctcctgcctcagcttcccgagtagctgggactaggggcgcacgctactacgcccagctaatttttgtattgtcagtagagatgggatttcaccatgttggccaggctggtctcgaactcctgacctcaagtgatctgcctgcctcagcctcccaaagtgttcagattacaggcgtgagccaccgcgcccggctcctttttcgatcttcatgttaatttctctcagctatctagctatgtatctgccttgtgtgtgttcatgacttttccagggcttacaatatgtatttttaacttaaaccaattagagttattatttgtttaaggtaatgtaagaatctcacaagagtatgtttacattcccctcatcttcagtgctgttgtcatatacattatttctgtaaacatcctaaacccaatactacagtgttaaaatttttaagccatcgtatagtaatacgtatttttaaagaaattaaggtaaatgtatgtagaaatatgtgtgtgtgctttatatctgtcacatttcttatgctcttcactccttaatgtagatacaagttgccatctgataccattttccttcatcctgaaagacttcctttaacatttagtacagttacctggcattggattttccattttaatctgaaaagattattttctctccagtttgcgaaaattaactggagatagaatcgctggttaacatatttttctctggcattgcagtgtcttctggctttcatagttttgtaatttttgttgagtaattattatattgttcttttatattttgatcttctctggctgtcttcaagattttctcgttatctttggccttcagcagtttgaccgtgatgtttctatgagccgttttctttgtgtttctactacttaagcattatgaagcttcttggctctctaagttttattttctattcactgtgagaagtacttggctattatttcaatatttttcctgtcccttttactctttcctctcattctaggactcccaatttacctgtatattggactgctggaaatgtgtttctgaagattcatattgtctcataagcttctgttcatttttcttcagtcttttttctcttttttgaggggtgggtggatatatgtaatttctattcttttattttcaaattcactaatctttcttctttttctgtttgctattaaacctgtctagtgaatttttaaatttcagttgtttttttctttccccctcccctcctctcccctcctctcccctcccctcccctcccctcccctcccctcccctcctcttgtttctgtgggttttaggagtgctctcaggcaagaaagccacaaacaaaattattacccctttctgttgcaattttttgagcataaactcttccccatcttctggctggttatgtatattttccagtgcctttgagtagttatttgttatattttatccagtcttattattttctgctgcagggttcttgtgaccatttcagtctgctggcattttcgttagtgggcttcctcatacttatttttgaattgatttttggaaattgcttcaaaattacagaatatttgcaaaaataaaaatagtagaataaatatatatggtgcagtgagttgtatgtggtttgtccccaccacaactcatggtgaaatttaattgccagtttaacggtattgaaaggtggtggggcctttaagaggtgtttggttgtggcatctctgccctctcgaatggcttatgcagactgggttagttcttttggactgggttggttctcgtgagatcaagttgttataaaacaaggcttcctctgatgtttggcctctttgcatgcacttgctttcccttcctctttctgctgtgatttgaagcagcatgagaccatcaccaaatgggctaccatccaacctccagaattgtgagccaaataaacttttttgtaaattacccagtctcaggtattctgttatagcaatacaaaacagattaagacatatggcatatatgttattatataaatggcatcataaaatgacctactattttacttagtttgctttatcatttattcatgtgctcttttgcatgcatacccttcctccttccttcccctttctcagtacatatgtatgtatgtgtatatgtatatgtatgttcatatgtgtttgttttgtttttgtctttgtttttgtttttgttttttgagacagagtctcgctctgtcacccaggctggagtgcagtggcacgatctcggctcactgcaacctccgcctcctgggttcaagcgattctcctgcctcagcctcccaagtagctgggattacaggtgcacgccaccatgcctggctaatttttgtgtttttagtagagacagggtttcaccatgttagtcaggctggtcttgaacacctgacctcatgatctgctcacctcggtctcccaaagtgctgggattacaggcgtgagccaccacccccggcctgtaagtgtttgtttctgtgaattttctaagaatgtcgatattgtctcatataaccacagtgtggttatcagcctcagtaaacttaactttgatacagtcattttgcctgttatctaccattcgtattataattttgtcaacatatagaataatatggttttttactttccagaacataatctagtccaaggttagttagttcattttcatgtcatgtctataattattattaagggaagggaattattatttcaataatctttctctgtcttttataacattgacatttcatttgtttatttaattttagattcagagtgtacatgtgcaggtttgttacatgggtatattatgtaatgctggggtttggggcttctattgaacctatcacccaaatagtttacatagtacctgataggtagtttttcagcccttacctccatcctttttcccctgttttggagtccccagtgtctattatttccatctttatgtccgtgtgtacccattgtttagctcctacttgtgagaacataggttatttgattttctgtttctgcattgattcacttaggatgatggcctctagctgcatccatgttgctgcagaggacatgatttcattcttttttatggctgcatagtatttcatggtgtgtgtgtaccacattttatttatccagtccactattgatgggcctatacgaagattccatgactttgctgttgggaatagtgctgcgataagcatacgagtgcaggtgtcttctggtagaacaatttattttcccagtcttgggattgttggattgaatggtagttctatttttagttccttgagaaatttccatactgtttgccatacaggttgaactaatttacatgaccaccaacaatatataagcattccctgttctgtgcatcctcactaacatctgtttttttgtttgtttgtttgtttgtttaactttttaataatagccattctgactggtgtgagatggcctatcttcttgtgggttttcttttcccatccttcactggtaccaagatctctttgtggttgtaatttgtatttctctgatgattagtgattttgagcattttttatgtttgctccctgtttgtgtaccttcttttgagaagtatctgtttatgtcctttgctcactttttaatgaggttatttgggtttttgttgttgatttgtttaagttccttatgtttctgcatattagtcctttgtaagatgcatggttcgcaaatgctttctcccattctgtaggttgtctttttactctgttgattgtttcttttgcagtgcagaagctcttttgcttaattaaatcatatttgtccatttttgtttttgttgcaatcgcttttgaggacttagtcataagttctttgccttggccaatgtccagagaagtttttcctagttttcctttaggaattttatagtttgaggtcttacatttaagtctttcatccatcttgagttgatttgtgtatatgagggggaagggtccagtttcattctcttgcatgtggctggacagttttcccagcatcatttattgaatagggtgtcctttccccattgtttatttctgtcagctttctcgtagatcagttggtagtaggtgtgtggttttatttctgggttctctgttctgttccgtagatctatatgtctatttttgtacttacaccgtgctgtttcagttaatatagccttgtagtatagtcaaagtcaggtaatgtgatatttccagctttgttctttttgtttaggattgctttggctagtcaggctttgttggtcccatatgaattttagaattgttttttctagttctgttagaatgttagaatgacaaatgatgttggtaatttgataggaattgcattgaatctgtagattgctttgggcagtatcatcattttaactatattgattcttaacaatctatgagcatagaatgtttttccctttgtgtcatctgtgatttctttcatcagtgttttgtagttctcctcgcagagacctttcacctctttggtttgatgtattcttaggcattttgtgtgtgtttgcattcgtgtggctattgtaaatgggatcttgttctttatttggctctaagcttgaatgttactggtgtatagaaatgctattgatttttgtacattgattttgtatcctggaactttactgaatttttttttttaatcaggtttaggagtcttttggagggacctttagagttttctaggtataggattattttctaggtataggattttctaggtaaaggattcttggcgaacagagataatttgactccctcttttcctatttggatgccttttatttctctgtcttgcatgattgctttctctaggacttccagtactaagttgaatacgagtggtgagagcagacatccttttcttgttccacttcttagggggaatggtttcagctttcgcccattcagtatgaagttggctgtaggtctgtcacagataactcttcttattttgaggtatgttcctttgatgcctagtttgttaaagatttttatcatgaaggggtgttggattttatccgatgctttttttacatctattaagatgatctttttttttttttttttttttttttgtttgagacggagtcttgctctgtcaccctggctggagtgcagtggcgcgatctcggctcactgcaagctccgtctcccaggttcacactattctcctgcctcagcctctctgagtagctggaactacaggcgcccaccaccaagcctggctatatttttgtatttttttagtagagatggggtttcaccgtggtctcaatctcctgacctcgtgatccgcccgcctcagcctcccaaagtgctaggattacaagcatgagccaccacacctggccggtttttgtttttaatcctgtttatgtgatgaatcacatttattgaacactgacattttagaatacaattcctcagttctcactttttttttttttcttttttgagatgaagtctcactctgttgcctaggctggagtgcagtggcgcgatctcggctcactgcaacctccacctcctggtttcaagcagttctctgcctcagcctcccgattagctgggactacaggtgcgtgccaccatgcctggctaagttttgtatttttagtagagacaggatttcaccatcttggccaggcttgtcttgaactcttgccctcaggtgatccacccaccttggcctcccaaagtgctgggattacaggcgtgagctaccgcgcctggccagttctcactttttaaaatagctttactgaggtataatttacatgccataaaattacttattgtatgtatacagttcaatatatatatattttttttttgagatggagtttcactgttgtagcccatgctggagtgcagtggcacaatctcggctcactgcaacctctgcctcctgggttcaagtgattctcctgcctcagcctcccgagtagctgggattacaggcatgtaccaccaggcctggctaattttgtatttttggtaaagacagggtttctccatgttggtcaggctggtctcaaacttccgacctcaggtgatccgccacctcagccttccaaagtgctgggattacaggcgtgaaccgccgcacctggcctgtgtgtgtacagttcaataatttttagtaaacttatagagttatatgattgtcacctctattcaacatttctgtcacaccagaaagttctcatgtgcccatttgcattcatccgtcctcccatcagaggaaaccattgatttgtttactgtctatagatttgctgtttctagacgtataagaatggcattgtgaaatatatagtcttttcttttttttttttttagatggagccttgctctgttgccaggctggaatacagtggtgttatatcggctcactgcaacctctgcctcctgggttcaagcaattcccctgcctcagcctcctgagtagctgggactacaggtgcacaccaccacacctggctaattttttgtattttagtagagacggggtttcaccatgttggccaggatggtctcaatctcctgaccttgtgatccacccgcctcagcctcccaaagtgctgggattacaggcatgagccaccatgcctggcccttttcattgtttattaaccatttgcatatcttttttagtaaaatgcctattcaattcttttctttattttaaaattagattgtgttcttattgaattgtaagaatttttagtatattctagacacaagtcctatatcaatataggattttcagatatttctccctgtctgtggcttatcttttcattttctcaatggtgtcatttcaggcacaaaagttttaaatgctgattaagtttaacttaccaatttttaaaatgggttgtgcttttggtgttgtaactaagaactttattcttaactcaaggttatgaagattttcttcactggtttcttctagaagttttacagttttagctcttacatttagagctacaatccattttagttaatttttatgtatcaaatgaggtgaaaatctaaattcattttcttgcatatgaatattcagttgtccttacaatctcatataaagagtatccttcctcccattgaattaccttggcacctttatcaaaaatcagctgactgtgaatctaagtgttcatttctagtctcctgattttgttccatgatctccatcttcctcctatgacagtagcacactatcttcattactgtagctttatattaagttttgaagttagaagtatacactccccaactttattttctttttcagaaattgttttgtctattttatgtcctttgaatttcaatgtaagttttaggatcagattgtgaatttccaaaagggaaaaaaaccaaaagcctgctgtggttgtgataccatgattatgttgaatctgcagataaattttggtgagaatcaccatcttaataatagtaagccttccaatctatgactgtctccctatttatttggagctttaacttcattcaacaatgtttgttaattttctttttaaaaatctttcttcttttcctcctttcctttccttttctctttctcttctctttctttcatcccactatgttgcccaaactggcctctaacttctggcctcaagcaatcctcccacctcagcctccttaagtgttgggattacaggcatgagccaccgtgcccagccttaattttcagtttacaaactttgtgctactttgtcacatttattccttagcattttattatttttatgctatcgtgaatagtattgttttctcagtttcatttttagaatagtcattgctagtatatagaaatataattattttttatatatttatcttatatgacctaagtacaattatgacttctagttgcttttttgaaattttatgcttacaaaattatataatctgtgaacaagagattttttttacttcttcctttctagttaagatgcctttcatttattttctcctcattttgtttgtcttctccttttttttttttttttttttgagacagagtctcactgtgtcaccaggctggagtgtggtggcacgatctcagctcactgcaacgtccgcctccggggttcaagcgattctcctgcctcagcctcccaagtagccgagactacatgtgtgtgctaccatagccagctaatttttctatttttagtggagacagggtttcgccatgttggccaggatggtctcaatctcttgacctcgtgatctgcccgcctcggcttcccaaagtgttgggactacaggcgtcataagtttttgagaacacgtgcaatatttgccacttcttctttcttcttctccttttccttctcctcctcctcctccttcttcttccttcctttctctttctcttttctgtgtctccctcttttgaattcaaccccttaaaaaggtaaaaaccatttttagctggcaggccatacagaaacaggtttcaggctggatttggcctgtcaggtgagtttgccaactcctgcaatagaaaatgtaatgcatagggctagacacagtggcttatgcctgtaatcccagcactttgggaggcttaggctgacctgaggtcaggagttcaagaccagcctggcaaacacggtaaaactctgtctctactaaaaatacaaaaattagctgggcgtagtcttggacgcctgtaatcccagctactcgggaggctaaggcaggagaatcgcttgaaccctggaggcggaggttgcagtgagctgagatcgcaccactgcactccagcttgggtgaaagaaagactccgtttaaaaaaaaaaacaaaaaaacaaaagaaagtgtaatgcatgaagtgaaatgaaaaatagatgctgggaaggatgtctaactgggagatagcttgtgatgtaaatatgtaaatatattatgaatgaccagtgggcaaggcaaaattgcctacacagccctacctatggcccctctgaaaatgttctttcttcagcagaatcgaagccagaaattcaacttagtccctcctgccctctgattttctccagtcagcaagctctcagccaacatgtgtggctgagtcatctctctcagctgttttcaagtttatgggcaggaaatcctctccacctgggaaaacactatccagaagatcagaaacaacagcaggatccattctgctttagtggcaaagcagaatggattcaagagggagaagactccagactcctgtttgggagagtaagcaaaaatggcacttcaaaggcactttccagcccacctgaagaacaacagccagcacagtccaaggaagacaacacagtggtggatatagggtccagccctgaacggagggcagatctagaggaaacagacaaagtattgcatggtttagaagtctcaggatttggagaaatcaaatatgaagagtttgggccaggctttatcaaggagtcaaacctccttagcctccagaagacacaaactggggagacaccttacatgtacactgagtggggagacagctttggcagtatgtcagtcctcatcaaaaacccaaggacacactctgggggaaagccttatgtgtgcagggaatgtgggcgaggctttacgtggaagtcaaacctgatcacacatcagaggacacactcaggggagaaaccttatgtgtgcaaggattgtggacgaggctttacttggaagtcgaacctctttacacatcagcggacacactcagggctcaagccttatgtgtgcaaggaatgtgggcagagctttagcctgaagtcaaacctcattacccaccagagggcgcacactggggagaagccttatgtttgcagggaatgtgggcgtggctttcgccagcattcacacctggtcagacacaagaggacacattcaggagagaagccttacatttgcagggagtgtgagcaaggctttagccagaagtcacacctcatcagacacttaaggacacacacaggagagaagccttatgtatgcacagaatgtgggcgtcactttagctggaaatcaaacctcaaaacacaccagaggacacactcaggggttaaaccttatgtctgcctggagtgcgggcagtgctttagcctgaagtcaaaccttaacaaacaccagaggtcacacacgggggagaagccatttgtatgtacggagtgtgggcgaggctttacccggaaatcaaccctgagcacgcaccagaggacacactcaggggagaagccatttgtatgtgctgagtgtggacgaggctttaatgataagtccaccctcatttcacaccagaggacacattcaggggaaaagccttttatgtgcagggagtgtggcagaaggtttcggcagaagcctaacctgtttaggcacaagagggcacactcaggtgcctttgtgtgcagggagtgtgggcaaggcttttgtgctaagttaactctcattaaacaccagagagcacacgcaggggggaagcctcatgtgtgcagggagtgtgggcaaggctttagccggcagtcacacctcattagacaccagaggacacattcaggagagaagccttatatttgcagaaagtgtggacggggctttagtcggaagtccaaccttatcagacatcagaggacacactcaggatagaaactttatgtgtatagggaatgtggtacagcctttagccaggagtcatacttcatcagacaccagaggacacacacagtgctgtggctttttcagccattgctagataccaaagtggagacattctgtgtgtgattatgcatgagactgtactggtaagacttgtatctccatccacctgaaggagaattgctggctcattttcaggagccctgcccttcctcactgtggatggtgggttgtggaaacccggtcaggtaatgatagtggcaggaggcagtcaaatgcccaggcagataggggtgggtacctggtgaaacccaaccttaaagctgaagacagtcccggctaaatcctcatactgaattgagaacctgtcttcccatttggtgtgctttcctccgattgatcccaacccttcacctattttacgtatacctgccctttcctaattggtttttacactgctgtgcccaccttttgagtggtgcctttgcatacttacaaatcagtcaacgtgtattcccctattctgagcccataaaagacccagactcagctgcagtgaggagagaaatcaccctgctgtgggggttggggaccactccctgcatcccctctccactgagagctgttcttttgctcaataaaattcttttctacccatcctcacccttcaattgtcagtgtatcctcattctttttggactcaggacaagcgctcagaaccactaaacatgggtataagctataatacaggcaggccaagagggcagggcacctccagcagcaggcccagggctaagtgagatccaggcagagggctgtcgctggctgtggaggtcctcagttggcaatgtggctgagaaaattcctgtgtcagtaacttgacggagaaagtacttttaaatgggttgaaattaggaaatgaatactattccagtgtcattttacaggtacactggaacattccttccactgtaccctggatgttacagaaactattgcgggaatgaaggaggaccagagagaccatggggtgagacaggaggatttatttatttatttttttgagacagagtctcgctctgtcacccaggctggagtgcagtggcgcgatctcggctcactgcaggctccgccccccaggttcacgccattcttctgcctcagcctcccgaggagctgggactacaagtgcctgccacctcacccggctaattttttgtatttttagtagagatggggtttcactgtgttagccaggatggtctcgatctcctgacctcatgatccgcccgcctcagcctcccaaagtgctgggattacaggcatgagccaccgcgcccagccgacaggaggatttattgagtgcactcagacccagaggattaacatccaaaaactgggcccagaacaaagacagcatttgacttttatacacacttctcaaagtgggtgggctaacttgaaacaagcttacagtggtgcaaaacgtagtggtgcaaaagccaggatacagaggcagagcaaaggcagttaatcaaattgtgacaggtgtataactcaggattacatatgacccttgcttatgcagcccagatggctgttatctaggcttgctcaaaagagccttgcatgggcttatctcataacctttgctatggtgcccagatggctgcagcccaggcctgcctcaggcatgtcttaaaactttcactgtgctgcttagataaaacagaatacttgaagttaactagttacagaaaacaggaatctataacctcataaaacttgcagagcaaggtacaatcacacggagggaggtgggattcgagggggatctttactttttcttatccttatgttgagggagtgctgggagagtctccagagcacattccttcaagcctttgcttctttgataatgttatcgagacctcgcctgggtccaggctttgcctgctaccgcctttaggatgagtcagcctagtatggaaagcttatttttctctttttaaattttattttcttctttctctaatttctgcctcaagacaacaatactagagcttgtcttttgatgtccatctgtcctaactgggaacaagagacttggaagacaccgtggctgatttactatgtgttccccagaccatgaccccacagagtcagcctcaggggagagtttggggaatggttaattcatggagacagggatagtccatgggtagaagagggttttattatatctaggtgactgcaagtatcctagctctaggttttaggaagaggtccatttttaaaaataactttgcttaagccttttggggttttgtctggtttctgggttgaatccacattgaagatatttttattgactgatgtatttagactagaagtgtattgttgttttatttataaaacacacaatatgcagaaatagaaaatgaaattaatttctattctcctttgaattaccaaacaacatcctacaggtaattcttgagtttaaatatttccaaccattgtaaaatgtaccattcttctggttgggaacatatattttttaatggcagtgttcaacaaattaactttaaatactaggttaggtcccagtttgtttgttttttgttttttttcatggaactagactgaatgattctgaattttatttggaaaataaaatttccaagaatcattaggaaaatatagaaactatatagtaacatgtcttgttcatatataagtttttagaatagctctttagaaccatattttaaaaaacagaaaaacaaacccatccatatatgagcattttgaatgcgataaagcaggatttcaaatcagcgtgaaaatggcaatcgtaagattcagtgtttgtgttgttggctatcaatttagggaaaaaataaatgtagatttatttgtttatccaaaggagttacagttagggcatcactgtccaaaatggtaagagatgttaggatcttaatttttgttcaacatctaagtgagtgagtagagttagaagatctggtaaaaaattatgaagtattatcctaggtggagtacttggcatggctggcttttcccagccctcccccatggcaattcatgggctggctttcatacttcttaacagaaaaatactttgaggccgggtacagtgtctcacacctgtaatcccagcactttgggaggccaaggcaggcagatcacaaggtcaggagtttgaggccagcctggccaatatggtgaaaccccatctctactaaaaatacaaaaattagccaagcgtggtggtgggtacctctagtcccagctactcaggaggctgaggcgggagaatcgcttgaacctgggaggcgggggttactgtgagctgagatcacaccactgcactccagcttgggtaacagagcgagactccatctcaaaaaaaaaaaaaaaaaaactttttgagataaactattttataatagtttaaaaactattgagttttaatcccctagagtcttagaatttaattattctcttccataaaattgtgtcacaaaacgatttcaaagttaaacatgttctttttgtgtttaacttttagaaagaatatcacagctttcaatttatttttattttatttaaagaccagtgtggctgggtgtggtagatcacacctgtaatcccaacattttgggagactggggcgtgtggatcacttgaggccaggagttcgagaccagcctggacaacatggtgaaaccccatctctactaaaaatacagaaattagccaggccgtgatggtgcatggctgtaatacccactactcaggaggagaatcgcttgagcccaggaggcggagattgcagtgagctgagattggccactgcattccagcctgggcgacagagtgagactgtctcaaaaataataataaagaacagtgtgatagtatacagctttcaatttaattcatccatataactaagattttgtcttaaattgttaaaaattcttagcaaaaaatagaacagatgctacctgaagacttaaatatatttaaaaagatacaaaccccaggatatggtttctatggagccacgcaaagagaacaggaattgtaagaaaggggtagaaggctacattctatcctttggcccagccccagccccaaccgtgttgattgttaaactcacattaggccctctgctcagaacctctcaggagagaaaattgaggcagataacctgagctgtccacctgggcctggcctggtactaaaatctgtgtgcaaatttggaacctgattaggaggcaagcaccacaaagtattcagttatgtggcttcttctgagtctggtgttttgatgattttccagtctgtctagaaagccattcactagtgctttatctttcccatcctgagatgacagctctagatgtttaaaaccaacagaaacctgtcccagagtaaccactgtccatcctaccattctcacggtaagtagtagactacactacacaaagaaaattttgaagaacagatggtaaacagtatgagacaatatcacctcaaatccacaagtctgttagggtcaccattaaaatgttcaattttaaaagaggtcatagtaagtttttatttgtttatttatttttaaatttttatttatttttattgagatggagtcgcactctgtcacccaggctggagtgcagtggtgcgatcttggctcaccacaacttccgccttccaggttcaactgattctcctgcctcagcctcctgagtagctagaattacaggtgcataccaccatgcccagctaatttttgtatttttagtagagacagggtttccccatgttggctaggctggtctcgagtcctgacttcaggtgatccacctgcctcggcctcccagagtgctgggattacaggcctgagccaccacgcctgatctaagtaagtttttaaatagctatttcatttaattctaattattatgtaacagtggttatctaagtgtggtcagataatgtttgggggccaggcacagtggctcatgcttgtaatcccagccctttgggaggctgaggcgggcggatcacttggggtcaggagttcgagaccagtctggccaacatgacaaaacctcgtctctactaaaaatacaaaaattagccgggcatggtggcgcacacctgtaaccccagctactcgggggctgaggcaggagagtcacttgaacccgggaggtggaggttgcggtgagccgagattgcaccactgcactccagcctgggcaacagagcaagcaagactctgtctcaaaaaaaaaaaaaaaaaaaaaaaagagacccgaaagaatgaaaaacaaaagtatttcattctggaactagacacagaatgaagacattgtgtgaggacctgagctgctgcagctaccttgcaaccacataaagcaacactgccaatacattgaggactgcagagcaggaggaaggattcttgctacaattggtcacctgctaagccaactgaacttcttgctaagtggggaaataaatatctttactgtataagctactttcagttgagcatataactgtataacttcctattaaaagcatcttaattgaaattcccaaattcgtatctctagtaccaacatttcactgagctccacacacatatatctaaatgcctacttgatatcactcttttgaaatccaacaagcatctgcgacttaacatgatacctcaccacccaccccatcctagataactgccacatactcattttcccctatcttagtaaataacactaccatttttccaggggctcaagacatttaggcattatattgaacttctctctttccctatattcacaaccaagcatcagcaacttctgttagttctacactcaaactgtatcccaatctgacaatttctcattgcctcttccagtgatgaccctaattcaaaccaccatcatcataagaccattggtctccaaaatagtttatacataaatgagcctgtcattgacatgtagagacctgggtcaacagtacagatggaggtccccagccagtccccttctgttcccactgccatccttgtcccacatcgtaagaggtcttctattcccacatgtggacactccagcttgcatatctaagctctgtctagccttaccaaattgctctcatttggccacattttgtggataggcagcacattccacctttggaagacagatcaagggaagggtctttggacacagaggagatacaggctctggaagcaggctggagtccatttgaacaggaaatcctggggatttggatacccagagcatggtctgaaagaaggttgtgagatctttgcaggcatgtttctgcctatggactttcaccaggaaggaaactgcttgactagaggagggccaaagtgtggccttttgtatgtttaataatattaaaatgttaaatatattattttgaccaattgagaaataataataataataaaataggccgggtgcgatggctcatgcctgtaaccccagcacttggggaggccgaggcaggtggatcacaagttcaggagatgaagaccatcctggccaacatggtgaaaccccatccctactaaaaatacaaaaattagctgggcgtggtggcaggtgcctgtaatcccagctcctcaggaggctgaggcaagagaatcgcttgaacccgggaggcggaggttgcagtgagcgccgagattgcctcaataaaagataccacagaccccgcccatggcaggagatgggggtgaaggaacagtaagaccaggagacagtcagatacacatcggatcagtggtatcctcacagtaacagaaacggtcacccccaatgtcagccacagtctctttcatccacaatcactttcacattcagctacccacaatcacgggacgtgatttaaaatacagaagctccctgcactgacaaaatccgccgctcctttcgtcggcaagcataaaggtgtgcagcaacagtcacacacgaaccaccacacccaagcattcaaccagtcagccccgcgcgcagcctggccgctttccccaacacagcagctcaaggtcactggagagcctacgaccgcacacagccctctccggtacctgcccccgtggcgcaggcgcgcagtggagggggccgcggggttctctgggagatgtagttcaacgatgacggccgtggcgcaaagcgttctggggctcgtggttcgcggggtccatggggaacgcggtgtcgctggttcagatctcgcagagctcagagtcctgcatgcctcagtcctcgcctcgctcctcctcgcggaggattctgggaggtgacgtcgcgggtctcggtcgcggggcccgtttgcagagcccgcggcgccgggaggtgagtggggccgggccccgggcgggagcgggaagtcaagggcgggctccgggtggcccggccgcgccagggatgggaacccggcaggagtcgctggggaggccgtgtgtgtttcactgtattaccaactatgtgacaggctgcgggtgtgacagaatgtgatcttgtgtcactgtgtgtgtgtgtttgtgcgcgtgcgcccgcttgtgtgtgactgtaaccatctgtgtctgggggtgaaactgtgaatatgtgtgtttgtgtgtgactgtctctgcaggtgtagctgtgtatgtgtttatgagagactggggtgtgacattgtgtgtttgtgtaaatgcatgtgtgtggttatgtgaccacctgtttctgcggatacaattgcgtttgaatgtgtgtgacagcaagtgtgattgtgcgactatgaccatctgtctccgcaggtatagttttgtatcagtaattgtgacaagatgtgtgacttctgtggtatgctactttgtgtgtgattgtgtgtgattgtttatctctgttggtgtagttgtatgttaccatctatctttgtgcttatgtggctgtgtattgtgtgagattatgggtgtgtttgtgtgactctatacatttgtgattgggtgagaatttgtgtgtatatatgagattgtgggattgatgtatgaagcacagaaatattagaattacccaagttcacacagttaacaagtgacagcaccagaactcaaacccaagcagtttagctctagaggtctcgcttttttttttttttttctcttgagatggagtctcactctattgcccaggctggagtgcaatgatgcgatctcggctcactgcaacctccgcctcccaggttcaagtgattctcctgcctcagcctcccaagtagctgggattacaggcgcgcaccaccacgcccagctagtttttgtatttttagtagagacgaggtttcaccatgtttggccaggctggtctccaactcctgacctcatgatccgcccaccagagcctcccacagtgctgggattacaggcgtgaggcgctgcgccctgctgcagtttttatggacaatttcaagctgcactacactaaggaaataactgctagggactgagttgcctagtgcaaagtagtccagaattagggggtgaaattagggggtgatgtatactgaattctaggtcaaccacagttgtccctttcttttcttttcttttcttttctttttttttttttttttttttttgagacagagtcttgctctgtcctgtaggctagagtgcagtggtgcaatctcggctcacagcaccctctacctcctgggttcaatcaagcctcccacctcagcctcccaagtagctgggactacagacacatgccaccacgcccaactaattcttgtactttttgaggagatggggttttgccatgttgcccaggctggtcttgaattcctagtctcaagtgatttgcccaccttgacctcccaaagtgctgggattactggtgtgagccactgtgcccagcctgtctctatttttacaatgaagaaatgttggctctaagaggacaaggaacttacttcagattgcccagtttgttgttgctttagtattaaaatttggcgatgtttccctcaggctgcatttctgtagagaaataaaggtaacacctgccatctctaaagatgcctctctaaggaatatatggcattgattactcgggttgtgttgaatatttcccattcagacatcgtggcctctcaaaagaggactggttttgaggtcacatttcagttggaccccggactttgagttggttgtttaagcttctggaacctcccttttactaccagtaaagtggagatattaatacctatctttgtagttttgtggagcagtagtagttctgaggattaaatgagataatgacacaatgagataaccatgtgtgacagtctctctatctttgtgctaatacggctgtgtgtgtgagagagagagattatgccaccgattgtgtaaatgtgtatatgtttgtgattgggtgagaattttatgtgtatgtgagatcacgggattatgtcggacctagtctgattgtgaggcacaggaagattaaaattacttgcccaacacagcatgagttaacattgtatatttatattacataaggcacagtaaaatttatttattcatttatctaattttttgagagactacaatggtctggtggtgttctgtcattagaatacacctgtgaaccaaacaaaacctagttctcttggatcttacaatcttgcatgggaagagaaacaataaagaaacaaagcagtatgtaacatgtccagtggtgataaatgctgagaaaaaaataattcagggtaaagaaaaatggagtacctggaacaggggttcccttgaggtagaattttcagggaagtccctctgatgaagggacacctgaatgcagataggaataaagaggagtggcccatgctggtgtctgggagaaggttccagacggaaggaaaagtccacaaccctgaagaaggggtgtacagtgtttgagtaacagtaggaagacatgtgcctggagtgtggcgagtaaggggcggaagggtaggaaattaggtcagaggtgcagccaggggccagatcatgaaccaccttgttggccgtaggacagactttggattttgttgagttcaggctatgcgtccttaatatataagtcaagactttgggagttaagttcagcattggattccaccccgccaccctggccagatcttggaaaaggtgaggctggcccatgtagggagaagaaaggggcagtagtatttttgtgggtcttggaccaaaaacacagggctggcacatcatcatttcttcattaactctcccttctcaggactttgttcttcttcagaagagaaaactgaagaaggaggaatggctgtggggctttgtaaagccatgtcccaggtaagcatgctctttcactttgttttcagacatttgacctcatttttcaggactttgggaccacagggaaaatcacaaatagcccaatgagcaccccttccacttctctctccaccttttgttcatataatccttctacaaaacatttaatatcttttttagtcagtgttatgctcaaatgtgtgatggagcagagctatcctctttagatggatgatgatttgttgagtcggcaatgagtgcaagtgaaataagggatagagtttgattactgagtgatctattaaatagggaggtcaaggatggcctctctgaggaagtgacatttagcaaaacaaaacttcagtgaaagtagcaagtaagttttgtggagatctggggaagagctttaaaagaaggagtacaaagttattatggtgggaacatgtttggtgtattccaggaatagcaatgagtctgtccttggagggaaatgagcactgtgatgtcagaggtatagctgggaaccaaattacgtaggccctttcaagtcatgatctgaactttgaatttggttctaagtgaaggagagccattggaacgtttgtgatctgatttgatttatgccttaaagtgaaaacagatagcaggggagtacaggtggaagcagagaggccagtcaggagactcttttagtaatccagacaggaggtgatagcagcctggatcatggtggtggcattggagctagtgagattctgggtatagactggagatagaaaatgcgatttgatcaaggattcgttgtggcatgtgagaggaagaagtcaggatgcctacagagatttttggctaggcagctacatgaatgggcatcccatttactgagctggaaagacaatgtgaagtgggatggatatcaataattgaattctggatatatttagagaccttttggatatccaaatggaatgctgattatacatctggagttcaggactacagatgtgaatttgggagtccttagtgtattttctttctttctttctttctttctttctttctttctttctttctttctttctttctttctttctttcttttctttctttctttctttctttctttcctttctttcctttctttcttttcttttcttttttttttttgagatggagtgttgctctgtcgctcaggctggagtgcaatggcgcaatctcggctcactgcagcctctgcctcctgggttcaagcgattctcctgcctcagctttccgggtagctgggactataggcacacaccaccacgcccagctaatttttgtatttttagtagagatggatttcacgatgttggccaagatggtcttgatctcctgacctcgtgatctgcctgcctcggcctcccaaagtgctgggattacaggggtgagccagtgtgcccggctgtccttagtgtatttaaaacatgagacaggatgagattatcttgagggcagttttgtggtgaacgtagataggaaagagatcgaaggactggctttaggatgttcaacattcagagccacacaagaagaggaggaaccagcaaaagagactgagaagaactgatgtagaaggaaaaccagaagagtgtgggttctggaagccaagaggagaaagtgtttcaaggatgggatgatcaactgagctaagttcctctgagagggactgaagaagacgaagactgagaactcaccgttggatttggtaacatggaaatattcttgacaagagctacttcatggaatgactgggatgaagacatcattgtggtgggtttaagagagaatggaggccgggtgcggtggcttatggctgtaatcccagtactttgggaggccaagatggcgggaccatcgcctgagcccaggagttcaagaccagttatgtatgcagggcaacacagggagactccatctctaaaaaaatttttaatactaaaatccaaaaacataggcatggcggcagatgcctatagtcccagctgcttgggagactgaggtgggaggatcgcttgagcccaggagtttgaggcagcagggagctatgattcatgtggtacacattacagcctgtgcaacagaaacagagtgagaccctgtcttaaaaaaaaataaaaaataaaaataaaaaggctaggtgcagtggctcatgctcatgcctattatcccagcactttgggaggctaaggcaggtggatgacctgaggtcaggagttcaaggctagcctggccaacatggtgaaaccccatctctactaataatacaaaaatcagccaggtgtggtagcgcatgcctgtaatcccagctactcaggagtctgaggcaggagaatcgcttgaacccaggaggtggaggttgcagtgagccaagatcgcgccattgcactccagcctggggcctgggtgacacgagtgaaactccatctccaaaaaaaaaaaaaaaaaaaaaaaaggcaggaaaaagagaatggaaaacgaggaaggtgagaacaaagacagtgaatttagacttacagtagtgtagccagcaggcacatatgagtactctaaattgtgatacactgtaagtgcaaagtatataccagattttgaagattcagtacaaaaaagagtgtaagaagtctcattaattttttatattgattacatgttgaaatgataacattttagatatgttgggttaaataaaaatgatattttttctatttatttttttcttgtgactactggaaaatttcaaattacatatgtgactcaagtatttctggtggataacactggtctaaacaacttacgggaagagttttgttattaagaggagtagagaaatgggacaatagctaaagggagatcatggaagggaacttatttatttatttatctatgtatttatttgcaagagggaagatattgcatcagtttttttgctgattggaatgatccagtaaagtgagaatagttggtagtaaaagggagagaggcgaaaatgtcttcgtgtgggcaagtggacggactggtctttgaagcctagagttttattcatagtcacagagggcagacagaatatacaggtatgagtacagatacagaagggtaagtacatatggtggctggaggatgaggaagttaaaagtgagatcgggatgagttgatggtggttcgagagagagttatgaaatagttatcaggagaggaggagagtgaatttattagggaagcatagtagagtggttttgcagtgcttttgaggacattctggccatatgcaagaagtactttgtgtcaacatgttttatcaatcagggttctagcaaggcaatcaaaaggcaactatttaaaagatattatcaggacatagagaaactataaaggatcatgctgtactctggggctcataacagcatagctctcttactaaccctagatctttgaatccagagacagagagctgggtggaggggcccctgacaggtgctctgaactttgattgaaagacagagaccacccagggtgggactcccacccagggagggagccaggggaataagtattctgccttacttaccttcctttcatctcttgcttgtggctgaacccaacagaatatgggatgggacaacggagtttattgatacagtcagcctcctaggactcagaaaagagtagaggagcacatggaagttatacaacactatggagttgtgtaaatttttccctagacacattcagccatagccataattccactatgtagaataaccatatttgatatttcttttctttttttttttttgagacggagtcttgctctgtcacccaggctggaagtacagtggcacaatcttggctccctgcagcctcctcccgagttcaagcaattctcctgcctcagcctcccgagtagttgggactacaggcacataccaccatgtccagctaatttttgtatttttagtagagacggagtgtcaccattttggccagactggtctcgaactcctgacttcaggtgatctgcctgccttggcttcccaaagtgctgggattacaggcgtgaaccactgcgcctggcctgatatttcattatttttgattaaaaaaagagaacatactgtacatactggaaccctatcatttttaagcactgaatactctttcttcatatggatattttataggaaacttcaccatttattccctgagtagcaaatatttactgagagtttacaatgtgatcagttttgtaatagatactggatatatatcagcttataaaacaaatctctctcccttcactcagcctacagttcagtgctatagcctaaactctatttttgaacatgtaagttttttccagattttttgcataaccttccaatgaaaattctatctaagttgcttcacatatacctcattatttcttcaggatatgttcctggacgtttctccttacatataaagtctaactttcaggccatacccttttgttaaagcccaattcaaggcctttctcctattctgccccacctgatgtctcaatttggggaatataaaggaatcccccatataagattttctttatacttagcatatgtaacatacaacttagtctttgctgtttcttgttataagctaattttgtgtatatatgtcttttttataaaaatgtaaaattttcaaatggtgagtctgtttctaatatttctcttctcttaaagtatttgacaaacctcagcatgtaattgttctccaataattattttcctcgcatcacttagagctttgaactctggccaaattcatcttttttgctaggaccatataggtgtctgggcacctggtgaacaagaatttttttatttcaggggttggtgaccttcagagatgtggcgctagacttttcccaagaagagtgggaatggctgaagccatctcagaaggatttatacagagatgtcatgttggagaactacaggaacttggtatggcttggtaaggatgtttctcccccataatttaaaaatcttcctctggggtgtttttgcttcctctgttgagaatatctaggacatcttaagacatcttaaaagcacttacttgcctttctacttcctgttcccaggaaatgatttgaaatatatatttgcttaaattttaattaattaatttacttttggcagacattctgaacacatgaagtaatttctttttttttttttttttttgagacagagtcttgctcttgtcgcccaggctggagtgcagtggtgcgatctcagctcactgcaacctccgcctcctggattcaagcgattctgctgcctcagcctcctgagtagcagggattacaggcgcccaccaccacacccagctaatttttgtacttttactagagatggggtttctccatgttggccaagctggtctcgaactcctgacctcagatgatccacccaccttgacctcccaaagtgttgggattacaggcgtgagccaccgcgcccagcatatgaagtaatttcatagagttggaaatgagtagttccctttgccgtagaatggtggtttggaacagcaacatcagcatgtcctgggaatttgttaaaatgcaaattatgaggccccattctagacctacaaaatcagaaactgtgggagtaggctcagtagtctgggttttaataaactctccaaatgatcctgatgtctgttaaagtttgagagccactgtagtttctgatgcagtagttctgggttgcggcctgagaatgtgcatttctaattagttcctaggtgatggctgcagctgctgtagcactttgagaaccactgtcacggcagaagcttcatcctcctcctcatccatacaagcgtcattccattctctagctcttcctctaatgtccattcttgcctgatgatcaagatattgggtctgcgtcctagacagctgtggcatgttgatttgtttgtctgtatgtctttctgtctcttgctctcatttttcttcccctgtgaacaggactctccatttctaagcccaacatgatctccttactggagcaagggaaggaaccgtggatggtggagagaaagatgtcacagggtcactgtgcaggtgagtgacagatcaccaggcagggaggactattgtaaggtactcaaccaagtagtaagtaggaaactgttttgagcttcaggtgggatgagaactgaaatctccatagtatgtgcttccctagaaacctcaccacaccctggggttttttctttttctttccatcaaattatactctccggtcttccacctataccttgaatctcaatccttctcagctcttcttttccttttatggttagaattgtattacatttctagatttctttttcagagtttttatttttatcagaattatcaaagatatgtacacacagtgtttaaagaatcaagtagtagtattaggttggtgcaaaaataattgcagttttgccaaaaaacgcaattacctttgcaccaaaaagcctatacaaggctttttcccttaaagaaggaattcttgttcccggctccccagtttccctcttcctagagcgatccactttcttttcttttgtagtttattttggtgttcccttcatgtctccaaaaatatgttaatgttgctactcttgattttttttcagggtgagcccttattcggtatcttcttataagaaaataaggagttagcactttcttctcctgaatccaacacataaggcacacacacaaatacacacatttcccatcccctatcttatcaatgtcatcattttgattaagtcactattcagcatttattttattatggccatttagtgctagtcatagctgtgctgtgcatatggcaagttactttttctctactcctttttatttttcctggagttaataatgacttgggaattttgtttgtttgtttgtttgtttttgctcagtttatatatacataaccctaatccagttcccgacttaccatcaattgtctgagtctttcaagatacttggacatattaggtgatctatccacttcatcttcttggagaaatctctcctggaatcctcagatacgcttcactctacacaaatggctcattatatttgcatgcactcaatttggatctatctgatttatctgatattttctcataattagattgaggtagtgcatttttgcaaagaatgtcacagaaataatgttgtatctctctcagtgcatcattccaaaggatgtataatatcgatatgtcttattatcggtgatgttaactttgcacacttagtgaaggtagtgtctgcttggtttctccattataaagttcttatttttctatttgtagttaataaatatcttgggggagatactttgagattattcagtttcttctgtaatttttgcccatttattttagcatttattgctggatctcttcaactattattactgtggtattaacctaatgttgatttgttccatttccctcttttctttgtgtatattaattgggattgttctgaaggaagagctgctctttctcctccatttacttatatattcaattatatttatggatttttttcctatgaggtaaatctaatttacctcataaaatttaatgacttcataaaatttaaatggatttatttttggatttatggatttttatttctatgaagtaaatccaatgaatcattatgtttctcaaatcgttccagctttgaatgttggaatctccttcacattggttcctttgaccttctgacatgcccccatgcattttttgggcacgtccttccttctggcacaaggtattccaggttctcttattttccttgccccagccttgaatcaaccacttctccaaggagccctcattgctttattgggaaatggtgtttagaaaccaagctaggtatgctctaggctactgggatatcactctttctggccctgacagcagctaaagctaggaaacagatagatagataggtagatagatagatagatagatagatagatagatagatagatagatatttacacacacacccctatatttatttctgcctctttttttcccattttttattacctctatctttttatatactaaaactatcagtttatattaataacttgatttctagtcctgctttacagggtttattgtagccttcctccttgacttatttgtaatttctttttctgataatgagaaaaaatatatttacctatttgttcaattttagtatacacataaagtagtttcagaatttctaacttacttctctgtgagaaacaaatttaccaactagatttaggtatttgtatatagtactttttgttttagtcttatagtgtccagtcaaaatactatttccaaaattacttaggttggttatttcaggtccatttgttactgtttttgtttgagatggagtctcgctctgtcaccaggctggagtgcagtgggcaatctcggctcactgcaagctccgcctcccgggttcaagtgattctcctgcctcagcctcccgggtagctgtgactacaggcgcatgccaccacgcctggctaatttttgtatttttagtagagacagggtttcaccatgttggccaggatggtctcaatctcttgacctcgtgatccgtgccagccttggcctcccaaagtgctgggattacagttatgagccaccatgcccggccgtatatacgtagttttataaggaattgctacattcccctccagaaaagttgtctgcttagtttttttcctgctgtaacaaattagcacacatttagtggcttaatccaacacaaatttattgtagctctggaggtcagaagtaaaaagtaggccttacagagctaaaatcaagatgtcagcagcctatattccttcctaaaactgtatgggagaatgcgtttccttgattttttatgctttttttttgagatggagccttgctctgtcacccaggctggagtgcaatggcacgatcttggctcactgcaacctctgccttccaggtacaagggattttcctgcctcagcctcccgagtagctgggattacaggtgctcaccatcatgcccagataatttttgtaattttagtagagacagggtttcgccatgttggccaggttgatctcaaactcctgacctcaggtgatccacccttcttggcctcccaatgtgctgggattatacaggtgtgagctaccacacccagctgattttttttttttttttgagacagagtttttctcttgttgtccaggctggagtgcagtggcgcaatcttggctcactgcaatctccacctcctgggttcaagcgattctcctgtatcagcctcccaagtagctgggactacaggtgcgtaccaccacacccagttaattgttgtatttttagtagagaccgggtttcaccatattggccaggctggtctcgaactcctgaccttgtgatccacctgcttcggcctcccaaagtgctgggagtacaggcatgagccaccgtgcccagcctattttccactttttaaaataactttaagtgtagggcttatatacaatacagatttgagttttactatataaaccaatctgattttcttttcattttaataagtgaaagtctaattacatttttggtaaatttgggcttaatcctatatattgtcttatgttatattttctgggttttatagtttttaaaaagcactttcaggctgggtgtggtggctcatgcctgtaatcccagcagtctgggaggctgaggtgggtggatcacgaggtcaagaattcaagaccagcctggccaacatggtgcaaccccgtctctactaaaaatacaaaaattagctgggcgtggtggtgtgttcctgtaatcccagctactcagaaggctgaggtaggaaaattgcttgaacctgggaggtggaggtcgcagtgagctgggatcgcgccacggcacttcagcttgggcgacagagcaagactccatctcggaaaaaaattaaaaagtaaaaataaataaattagcctgacatggtgctgtgcacttattattccaactacttaggagactgaggtaggagggtcacttaagcctcggaggtcaaggctgcaatgagctgtgatagtgccactggactccagcctaggctaggtgacagagcaagaccctgtctcaaaaaaaaaaacaaaatgtgtaccttgaagtaaaattgctggaacatggaagtgcatgttttaatttacaagatactcaacttgttctgggaagtgattgtatcagtttatgctcgtactaacaatgacagtgtctgagaatggcatttccttcctctcttgatattcttcaacttaagcttttgatattgtccttaatattgtctaagtgaaatttctgctgatatgaggaagggaaatgctgttatggttttaatttactagtgatattattgagcatctttccaggaatgcattgtctataaagtttttctcttctgtgaattacctgctcatacatttttttgttttgttttttgagacaggttctcactctgttgcccaggctggagtgcagtggcatgatcttggctcactgcagcctatacctacggaactcaagcaatcttctcacctcagcatgcacaccactgcacctggttaatttttttgtttatttttcttgtagagacgaggtctcactgtgttgcccaggctggtctagcactcctgggctcaagcgatcctcccatcttggcatcccaaactgttgggattactggcatacttccacttttggagaattagattatttttctttttcttactgatttgtagtagaactaaattctgggcattattcatttttctatgatatatgttttagttgttttttctcagattgtcccttgccttttgactttgtgttttctcccgcacacaagttttcaaggttaatgtcaaattcattcctttcaaccagatgtcgtcaggatggtagtgaggaggtcatgctccccttcactgtgttctctgtgtcttgcaggtttttaatgctgtaagtgtgtttctcttgatatttttttcatgaccttttccacaatgatagggaattttacaagtcaaccctggttgagttctttcacagagattttggtggaagaaaggtataaaatgcaagggcttaggtcctattattggttttggaatgttctttttttgttcataattttcttttatattattgattacttttgtccaagtttatttaaaataattttcttaagttctgaaataaaatccttatggaattctggttgaaactgatctgatgtaaattaacctgtggtaaaaacatatgcatatattatttttttgctttgttgcaattatatattacatgggttcatttaaatcttccttagaagaatttcgtaacattttgtaggactttttttgtgttcttgccaaccttactcccttctctcttccaattacttacatagcagttgtaatctcaactcactgccttcacctcaggttctcttccactgtcttatcacttgtaatctggcttctgcccttctagtttagctacatccaggtacccttcttcattttcatatccttcagcttattgagatgtataagatagttcttaccactatccattttctcttttcagagctctgttctccctttaatggactctttcccctgtttttctgttgtttcctcgtttaccataagatctttgttgtattaatgtggatctctgtccagttctgtgtagtagaactttcttttctcttcttttccttttttttttttttttttttttgagacagtctagctttgtcacccaggctggaatgctgtggcgtgatcttggctcactgcaacctccacctgccagttcaagcaattctcgtgcctcagccacctgggtagctgggattatagatgtgagccactgcgcccagctaatttttgtattttcagtagagacgaggtttcactgtgttggccaggctggccttgaactcctggcctcaagtgatccaccagcctcggcctcccaaagtgttgggattacaggcgggaacccccatgcttggcctctagtagaaatttctctgatgatggaaataatctatatgtgtgctttctaatacagtagccactagccacatttagctttgagtgcataaaatgtggctagtgtgagtaaggaactgactttttaaaatgttatttaaatttaaattgctgcttatacttagtggctaccgtattggatagcacagctctatacagtcttttaatcaaggggatccaatctgtaagtctatatgtaaagatagtggttggagctccaggcacctcagagtctcccatgttggaaaataactgtagtcttctcccatcaggcttcttttattcagcattaagttagttattgtataaatctgctatttgcctggagtaaagacttatttttggtaagatggagtatagtggcttcaggtgatgcctacaagagatgagatccaggcaagtgagtgagggaacagaagtagttgtatttctagggaaagaatgaatggtatggacctgacaaaggacaggcgaacaaggcctctcaggcctgggtgtagacaagtaagaaaatccaaggcggtatataggacggactggtagggatgaggctttccttgggtgaagggtgtattggaaagaagaaagatacagatgaataatatttccttttcaattttgttctgacctatactggagacagctttacttttcaacagatgagaaactgttatggcaaagactgtatctatttaacccccaaatgccaaaatacgtagttctaaaataatccgtaaccacatctaaacatgaaaatgtctctgtcactgaaatagtcactatattttggaatcctgattatagccttgaacaccaagctcatattctccgagaattattccttaactaagctagtgagttttgatctcttttttcctgacatttatacctgtaataatctatatcatattagcttatccttcattatgtgccatatggaattatcacctgcacaggcttgagctctcagaatttacaaaaggtagaaagaccttgtgtcaggctttcccccctctactaggtacttcagacctactaataggttctatgtatttgaatatattggctgattattgtggtgtgaaaggactttctcattttttgagatcatcttctaaaaaatagttttatttctaccttacccaaccaatatcctctcctgaaagtatcacgtatcttctcaataggcatcattttcccttaatggtgagaaaagctgaccactaggtttcttttagtcactgagaaaaaatatatataaatttttcctggaccctgataaaaatcttagaagttgttgaacagcattagtggaaaaagttgctatgagattaatctggcagcagtcatccatttaacaacatgctgacattgtctgaggcattggatgcaatagtagaagaaaaaggggtgaacatccatccctgccctcatggagctttcagtcttatgaataccagtgcagaatggacaggagggcttaaagactagaggcagggaaactggctgtgatctaatcagacatcctcaactccttatcttgttagcatttagctttgcctgccttttgatgacctgcattttacctgtgtccccaactaccacctccctatcgtcaacacatataccttcccttctcagctctctttattctttgtgcttccattgtcttttgttcatattgcatggccatatttgggagctattagaaccacagactttctaccctccttccccccagttaaattcttccatttcttctctaacaattttcttcctcatagcaaaagaacaaaggagacatttgctttcttgatatttttcagactgggagtcttggtgtgaaattgaggaattatctccaaaatggttcattgatgaagatgaaatatcccaggagatggtaatggaaaggctagcaagtcatggccttgaatgctccagtttcagagaagcctggaaatataagggtgaatttgagctacatcagggaaatgcggagaggcatttcatgcaagtgacagctgttaaggaaatctctactgggaaaagagacaatgaatttagtaattctgggagaagcatacccctgaaatcagtatttttaacacaacagaaagttcctaccatacagcaagtacataaatttgatatttatgataaactcttcccccaaaattcagtcataattgaatataaaagactccatgctgagaaggaatctttgataggtaatgaatgtgaagaattcaaccagagtacgtaccttagtaaagatataggaattcctcctggggagaaaccttatgaaagtcatgatttttcaaagctcttaagtttccactcattatttactcaacatcagaccactcattttggaaaattaccccatggatacgatgaatgtggtgatgcctttagctgttactcattctttactcaacctcagagaattcacagtggagaaaaaccatatgcatgcaatgactgtggaaaagcctttagccacgacttctttctcagtgaacatcaaagaactcatattggggagaaaccttatgaatgtaaggaatgtaacaaagctttcagacagagtgctcaccttgctcaacatcagaggatccacactggagagaaaccgtttgcgtgcaatgaatgtgggaaggcctttagccgttatgccttccttgttgaacatcagagaattcacacaggtgagaaaccatatgaatgtaaagaatgtaataaagccttcagacagagtgctcaccttaatcaacatcagaggattcacactggagagaaaccctatgaatgtaatcagtgtggaaaagccttcagcagacgcatagcccttactctacatcaaagaattcacacaggagagaaacccttcaaatgtagtgaatgtgggaagacctttggctatcgctcacacctgaatcaacatcagagaattcataccggagaaaagccctatgaatgcatcaaatgtgggaagttttttaggactgactcacaacttaatcgacatcatagaattcacactggagagagaccatttgaatgcagtaaatgtgggaaagccttcagtgatgctttagttctaattcaccataagagaagtcatgcaggagagaaaccctatgaatgtaacaaatgtggaaaggccttcagttgtggctcatatcttaatcaacatcaaagaattcatactggagagaaaccctatgaatgtagtgaatgtgggaaggcttttcatcagatcttgtccctaagactacaccagagaattcacgctggagaaaaaccttataaatgtaacgaatgtgggaataattttagctgtgtctcagcccttagacgacatcagagaattcataatagagaaacgctctgattataacaagtataggaaagaaaacatgtggttaccactcaatccttattaaatattagtgagttctttttggttagtaattctttgaatgtagttcatatttcagttcatgagtatccgttatttgaagtagctcagtagtagacatctgttacttttttttttttcagacagagtctcgctctgttgcccaggctggagtgcagtggtgtaatcttggctcactgcagcctctgcctcctgggttcaagcaatcctcctgcctcagcctcctgagtagctgggattacaggtgcctgccaccatacctggctaatttttgtatttttagtagagacggggtttcaccacattggtcaggctgatctcgaactcctgactttaggtgatccacacgcctcagactcccaaagtgctgggattatgggcgtgagccaccgcgcctggccacatctgttactttttgatctgttctatacctggcttagcccaccctcaatgcatatgattcagatgaaactgttaatcagggacagcagtggactggtcacaggctggccaattatttcccccaacctagtgataagggattggcaaatggccctgtctggatcaatgaagtcctttgcgggtattcctatgggcagtaagagaggttttattctggaactgcaagtttcaaggatttaataagattaaaaactcaccagtagcctttttgccactcatgaggaaagctttcccaaagagaaatctaacagaggaaaatggagatgagagacagaaatatgatgatacagcttgatctcctggatccagtcattcctgacagctacaccatcaccatcctttttcattttttgtgatccaataaatttcctttttttgcttaatttggattatatttttgcctcatggaattagagtgctgattcacacattctatgtttgctatacataaaagaaagccttaattttttacgtggcataattatttatcctgaggagcaaccttctgatataacaagtttatgaaagttgaatacacagccttcataaaactgagataattgttacattttatttgtcgataaaactattttagtgtttcttagtttttttcacattatggctgaatattttaaaattcaccaagtaaaattctttaacaggcttccccttaaggagttaaaatcatttgtcacagtgactcaccatttgcctgtaaagagagaatggaaagctaagagaataatactttcatttgtttaatgaatggctcttcatcttcaaggaattacttgattttcttctttcagtatgggtctaaacatattctgtggcagaatataataacaattaaattgtaaatgaggtcttttgtgggtgggctctaaatttggtttaagacccagtgcggtggctcacgcctgtaatccgagcactttgggaggccgaggtgggcagatcacctgaggtcaggagttcgagaccagcctgaccaacatggagaaaccccgtctctactaaaaatacaaaattagccgggtgtggtggtgcgtgcttgtaatcccagctactcaggagggtgaggcaggagaatcacttgaacctgggaagtggaggttacagtgagcgaagatcgcgccattgtactccagcctgggcaacaagagcgaaactccttctcaaaaaaaaaaaaaaaaaaaaaataaataaataaataaataaataaatttggtttaagaagtgtatggataacttctttgcagctagagatatcaaacaaagatattgctggcagaaagaatgagtcatttttaacaaatggtaaaagtaaagcagttaatgcctaaaatttttagagactaaatcatttccattattgggagtaatgaggaagatgaaggtgtagggcaatacgtttcttttttatctgagtggatatagggaaataaactggtgatatggcagctgggccatcttgaatagtgagaaccagtaagaatattgggtattgcctgaagagcatctgtaaaaacatatcagaacaaatgaaagaggaaagaatgaaggatttatatgtgtgcatagagtgaatatatgtgtgcatagagtgaaatattcaacttatacttatttctaataaaatctgaaaattatttttcataaatattcaaattccctttaaacagcttaaaatacagatttagtgactcagtacttcaaaccttgaatagaaacaaatatgattataaaatatttccaaacttatgttacatctaatctgaaacatattaatattataagcttaattcatgtcatcatttctttattttttattatatttcctggaggtataaggatatttatttttataatttccaagcactgagtaataatttatttcagaaagtttcagaaggttacagtaaactttaccaaacttgaagaagaatgactcagatcagtaagaagagtctgagttactcactaattgatttttattttatttatttattttttttgagacagggtctcactctgttatccaggctggaatgcggtgacacaatcatggctcactgcagcctcaacttcccaggctcaagcgaccctcccacctcagcctcctgagtagctgggactacaggtgtgctctaccacacctggctaagtttcgcgtttttctgtagagatggggtttcgcgagttgcccaggctggtctccaactcttggcctgaagtgatttgcccatctcggcttcccaaagtgctgagattatagggatgagtcactgtgcacagctactaattgatttttgatctatgtatggcacctgatttcatcctcgagagtgacgtaaacctaagctactggttcattctctgtttatatagttaaacttcacttgtaatgttgataaaatcttttgtacccatgtgtttagcttcagtgtattttacaatctgatgtttctcctcacaatgaagtactaaattttgtttcttttcaactgtacaacccattgtcttgtgatatattgacctgatctcttaggattagtgaaaatttatgctttattaatatttgattgttattaggaccatctagagatttctgtttatgtgtgtgtatgtgcatctgaagatgtgtattttatttaaattttttgtattaagtgcctactgtgtgccaggctttgttctaatctaagcaatggagatacagcagtgaaccaaacagacaagaattcctgccttcagagagctaatttctaataaggaagacaatgaaaaagatatgtaagtaaaatatataatatgtaagaaagtaaattccaaggtgaaaaagatgaaaaaagggatggggagccagggaaggcccttctgaagttaacttttgagtgaagacctaaaagagaaatatctatctatctgtctatctacctatctctatctatctatctatctatctatctatctatctatctatctatctatctatctatctatctactcatccatccatctatccaaactacatatatatacccacctatagacacatttatatgcctttatagctaatgggaaggaaatctttagtggtatatatacatttacactttatacttactaatttattctcattttatcatgtctacatatttgtgtgttacattttaacacttgactcagatgaattatggccttttacaatctaaacaaatttcacttaattatagtgtatttaatgttggtgcttaattgtcagaatgtagccactggggattaatttaagaaaactccttgctccctccagtacatgaattttggacaaaattgctgccattatgattgagcccgttttagagatcgctggggaaaaaaatgtttcctttttagaacatggtttcatgctgatttctggttctgtctcaatatattttgttataccctactaagattttcaactttattcacaaaactcgagacagggaggtaatagattggatggtggagaaaagtagattgctggaagccatgaggtggcgatacttcactaacagaggaataagtcgccttcctggacagctttcttagacaggtatttacacagcaatttctcacatattctttgagaaagagtagtgaaagtatcagctctttggatattgggacaagtatggactttggagttagacctacatatggatgtcaactctttgtcaggagagcttgaataagtgattcaggctcagtttagtcatctgtaacactggaataataattctagccttttgattttttgtgaggattaattgaaagaatgtaatttgtaaacagttaacaatggggttattattaatgataaaatcaatcacaaagagttggactgtgtccctgaaagccagctactcatgggggacggaattgtgaatttagcccacgtccttcctctacgtacatgggttgagtcccaaacagcagtggccccagcccatctttctgatcctggagtggtacctgcagctctagagtctcccagagctccctctatatatacgtatttcttttcaagacggagttttgctcttgttgcccaggcccgagtgcaatggcacaatctcggctcactgcaacctccccctcctgggttcaagcgattctcctgcctcagcctcccgagtagctgggattacaggtgcctgctaccatgcaaggctaattttttgtctgtgtgtttttagtagagacaaggtttcgccatgttggccaggctggtcttgaactcctgacctcaggtgatccgcccgcctcggcctcccaaagtgctgggattataggcgtgagccaccacgtccggccttgatatttgagactgttaggactctgactttgttctttttttttgagtcagagtctcgctctgtctcccaggctggagtgcagtggtgcgatcttggctcactgcaatctccacctcctgggttcaagcgattctcctgcctcagcctcccgagtagctggtattacagtcacctgccaccatgcctggctaatttttatatttttagcagagacagggtttcactatgttgtccaggttggtctcaaactcctgacctcgggtgatccacccgcctcagcctcccaaaggactgggattacaggcacccagccaggatgctgacttttattaacagaggccaggaaaagaaaaaaataggcatagctcttggttttgttttttttcattttgcatttttttttagacttcatagcacattatcaaaataatttactgtcacactaatttcttgatttgttccccccccatcattcccaattcctattcttcataggcacacacacaggtatgtttgatatacattcttaaatgaatgtgcattcccataatacgaatggtactatgctacaaattcatttttttctagtgagaactgatttttagatttttcatgtttctctgtgcacagtgctctaatgctgttcatcccttctaacatttgtgtagtaattccttgtgtatatttactacattttacttatctattcctgtagtgatggatgcaactcctggctaccacaaagaatattcttgcagactggaactaggttagactatttgcctggcaattgcctagtgggataaagagtttttcgtacactcaatgttaccaggaacaaccagattgctttctagaatggctgcaactgtttacattctcaccagcagcacctctttctacatccttgcaaacactcgttctttaatgtgttcatttgcattattaaggactactggtgaattagagcacatctctgtatacttgccactcacttggacactctatgaagtgtttattcttaccctgtttatcccttatcaaataatttatcaactccattcataaaagttaagatttagttgaaaatccatctggccttgagactttttttttcccctgaaggaatgtctctatatatgacttcagtttattaggtttattcaagtgtattcattttgttaggttatcaacttttcttacaaatagtcctttataatatttttattattttaacttcatgtttcttatttgcatctttttcgttttcttatttgaatctttgctcattttttgaatatcagccttaaaagaggtttatataacttattgatcattgatcttttcaaaaccctgtctcagttttgttatccttttctcttacttttttctaattctctattttattgatttctttatctttataatttcttttttgtttcttttagtgtgctgtgttcctcttattccacacttgtaaattgacaatttgatttttatttttgataaatgtatttaaagctgtaattttcctctaagtactacataagctatgtctcacaattttggcgtttaatgttttcattgttattcattttcacatgttttgtaatttatgtattcttttttaattcaaaaggcttggctatctttttctaatgctattgcaggatagtcagatgtttacatttgttctttggaactgaatgaggcttcgcttactgcctcatatgtgatcaattttcataactgtcactttttaaaattattatttatttatttatttatttttgagatggaatcttgctgtgctacccaggctgcagtgcagtggcacgatctcagcttattgcaacttccacctcccaggttcaagcgattctcctgcctcagcctcccgagtagctgggactacaggcgtacgccaccacacccagctaatttttgtacttttggtagagacggggtttcactatgttggccaggatggtctccatctcttgacctcatgatccacccaccttgtcctcccaaagtgctgggattacaggcgtgagccactgtgcctggcctccatatactttaaaaataaatgtgacagctcgggcatggtggctcacgcctgtaatcccagcactttgggaggacgaggtgggtggatcatgaggtcaagagatcgagaccatcctggccaacatagtaaaaccccgtctctaccaaaagaacaaaaattagctaggtgtggtggtgtgcacgtgtagtcccagctactcgggaggctgaggaggagaatcgcttgaacctgggaggtggaagttgcagtgagccgagactgatccactgcactccagcctgggcgacagagcaaggctccatctctaaataaataaataaagtataggtattacaggcttttggggtgtaaattccccgtctgttagctcaagccaaccaactattggatttttctcaatttgataggtagaacatgatttcccagtgtagttttaatttgtttttttcttattatgaatgagtttgcacttcttttctgtgaactctcatgatatttttgcccaattttcaactggactctagcgtttttcttgtatagcagggaaattagcactttatgtgagttgcaaatattttcttccagtttgctatttgtcttttgaatttgtttatggtccttttgccatgaaaaattgataatattatctaatttgccagtttgttcctttaagtcttcttagttttgattcacgtttaaaaaaaggccctctgcatcttgggtgtgttagttcatttggtgctgctataacagaatacctgagatgagtaatttaaaaggaatataaatttattttctcataagtctggagtctgggacgtccaagatcaggatgctggcatctgatgagggccttcttgttgcatcctcacatggcagaaggcagaaggggcaagaaagcaagagagagctcccttcaacctcaaaccctcttataaggcccctaatcccatccatgaggactttgcccttatgacttaattacctcttaaaggccccacctcttaatactgtaacattggagataagattttaacctatgaattttggaggggacatacacattcaaaccatagcattccacctgtagcaccccccacctcccaaaattttgtttttctcacatgaaaaatacattaattctatcttaatagcccccaaatcttattccagcatcatctcaaaagtctaaggtccagagtctcatccaaatcagatctaggtgagactcaaggcatggtgcattttgagggaaatctacctccagtgtaagcctatgaaatcaaacaagttttgtgctttcaaaatacaatgacatagagtagacattttgattccaaaggagaaataggaaagaagaaagatgtaacaggtctcaatgaagtccaaaacacaaaagggcaaacagtattgaatctttaggcttgagaataatctttgacttcatgtcctactttccacacactagggaagcagttgggctcccaaatccctgagcagccccacccccacagctttgctgagtgcagcccattcttcagctgtcacatgttgaagttgcgtgcttgcaactttcgcaggctggtgatgcacacgggtggctctacagtttggggtcttgaaggctgccccccatctgcatggctccactaggagttgccatagtggcgactctctgtagtggccctgaggctgtccaagatattctttaaaatctaagtggaggaagccatgcctccacagctcttgcgctgcacacctgcagaattagcaccatgtggccattaccaaagctcaccacttgtgccctctggggcagcaacctgagcaacatcctgggccagcttgagccacagcagaggcagcggagtgctgtgctggaatgcagggagcagagacccgaggcagccctgggcagtgagcctcaaggtaccatgggcaccctggcctctctctcaaaaccgttctgccctcaaaaccctgctattctgggcctttggtgggcatggcaacctcagagatctcaaaaatgtctttggggtcatcctcccactattctgatgaacagaacctggcttccgtctagccatgctaatcttactgaatagccacttggccacacccttggttttcatctaaatacccttttttattctttacatggccaagctgaacatttttcaaatctttatattctgcttcacttttaattataaattgtgtcttcaatttttttctcttttctcacattttactaaaagcaattaagagaagccatgcagctccttcaatacttttcttctgccaaatattctacctagttcattgctattaacttcttccttgatagagccctcagggatggacagaattcagccaagtcttttgctattttgtaacaaagatggcctttccttcaatttccaataagatattcctcatttccatcgatacctcatcagaatagcctttatggtccatatttctaccgacattctgttcatgaccacttaaataatctctaatatgtaggctctctctacagctctcgtcttctgagccctcaccagtatcattcttaatgcttcatttatggcaatataggcttttcctagcctgcttctccaaattcttcccgcctctgcccattacacaattccaacgccccttccacatttttaggtatttttaatagtacaccccacttctctattttagtcttttttgcctccttaacagaataccacagactaggtaaataataaagaacagaaatttatttcttacagttctggagtctgggaaattcaatatcaaggtcctggcatctagtgagagccttcttgctccgtcctcacatggcagaaggcaaaaggggtaagaaagcaaaacagagcttcctttaacctcaactcattttctttttttttctttttttgagacagagtcttgctcttgttgcccaggttggagtgcaatggcacgatcttggctcactgcaacttccacttcctgggttcaagcaattctcctgcctcagcctcctgagtagctgggattacaggtgcccaccaccacgccaggctaatttttgtgttttcagtagagatggggttttgccatgttggccaggctggtcccgaactcctgacctcgtgatctgcctgcctcagcctcccaaagtgctgggattccaggcgtgagccaccgtgcccagccaacctcaagtacttttataagggtcctaatcccatacatggcctcacctcttaatattgtcacattagggattaggttttaacctaggaattttggagggaacacaaacattcaaaccatatccctgagataattttaaaattttcccatgatttcctcctgttatgtttttgctttcatttttttcctttaattttttttgtgtgtacaaatccaactttacccctctacagttacctagtttccaatgatcatttacaaataattcaacatttgccacatatttgaaatgtcacctttaacatatacctaattactacatgtatttgggtacattcatgtatttcctattctgttgcaataatttgttcaagtctactgtctgcttgtttcttgagagaagagttttgaaatctctgctataattatgaatttgtccatttctctttttttgttccatcagtttttgcttcatgtattttggagtttttttgactaaatgcataaacgtttgggattgttatgtactgttaattgatcctattgttacaaaatgacattctttgtccctgttaatattcttagctctcaaatctactttgatagtggtatatctactccagcttagtattttttaatttttcagactgggtcttgctctgtcacccaggctcgagcccagtggtgcaatcacagctcactgcagcctcgacctctgggctcaagtgatcctctcacctcacccttcggagtagctggaaccacaggcacacaccaccatgcctggctaattttttgattttttataaagacgaggtctccctgtgttgccaggctggtcttaaactgggctcctgcctcagcctcccaaagtgttaggtttacaggcgtgagccacagcacctggtctacttcagctttttaaaattagcattagcatggtatatctttttctttttttttgttttgcttttaacctatttatattttaatataaccttatttattataatttaaatatgacctttgtaatttaaatataacctttatagttaaaatgggcatcatatagttgggtgtttttttaattcagcctgaagatctctgtttattgggatgtttagaccatttacacattttatataatttattgagtaaaaatcacataatatgaaagtaatcattttaaagtgaacaattcagtggcatttagtacattcacagtgttgtgcaatagccacttctaattccaaaacacttcgatcattccaaaggaaaacctcttaccaattaagcactttctcccccattctccccttcctctattccctagtaaccactaatctgtgttctttctctatggatttatttattttaggtatttcatataaattgaatcatgcaatatgtaaccttttgtatctactttctttagcataatgttttgcagcttcatccatgttgtggcgttatgcatactccattcttttttatggctgaataatattccattgcatgaattaccacactggtaattttgtctatttggtaactttcatctatttggtaacctggtaactttattcatctgttgatggacatctgggttatttccaccttgtggctattgtaaatagtgctgctatgaacatgtgtgtgcatggtcttgtattcagttcttttgggtatatacctaggggtagaattattaagtcatacggtaattcaatgtttagctttctgaggaactgccaaattgttttctacagtggctgaactattttacattcccaccagcaatgtatcagttttccaatatcttcacatcctcactaacacccagtttcctttttttgattattgccattctagtagatgtgaagtggtaccttattgtggttttcatttacatttcactaatgactaataaggtcaaacatcttttcatatgcttactggtcatttgtatatcttctttggctagatgtctactcatgtcttttacccaaagtctaattttgttgtttgtcttttcattgttgagtcataaagagatcttaatatgtattagataatagacctttatcctatacctaatttgcaaatattttcctccatctttaggctatctttttactgtcttcataatgtcctgtgatgcatcacagtttctaatgtttatgaagtgcagtttaacaaatgagatgtgagcaaaagggatgagtgtaatttctggactgcaaccctagaaagcactgtgcctgcttcctctgccctctcctgccctattggctgggagatgctgagagttttaacatccccctttgccccaaagatggatactactcactatggaaggcagagctatcccaccagccctggactgctcagccctagattcttacacgaggtacaaataaatatatggtattcaggtcattgaatatgtattttggggtctttactatatcagcttaacctatactctaattttacaactccagtgtgccatacaaatagtaccattttctggttgtgccatgatgaaggctgggaagcactatgacctggaccatttgttcttggtcccttttgctgacccttccttctcactgccatcaagagggcaatcctttcctccacaccatccaggtaattagcttatagtggtcccaaagataaaggtcgaataccccagctcttgcagaaaatttgagcatatgttggccataggaagccattgccttgccttgggtagcacctgggataaaggttggtgagccctggtgctggaaatccccaaatatggccccttccaggggcccgacacccatgaaagactgtacttgcatcatgggttgtcctgacatagagttccctctcccttcctagctgggagtcaggagttccacctcctccaaagacagacattttcattgttgttccctcaagtcctcacggtcactttctcctgctctggctggcttgggacaaaactgaacctcccagtttatcttccagcctctgagctccgttatgatacagtgagctgccaaaattaaggtgaactgcagatctaacttctttgcttgtcggtccccttggacatgcatcctcagagcgctcctctcccaggaggagcctcccacccctggggcttcctcacagcagcaccttcgagctgaggtggtgggcaggagctccttggaaccctcccttcctccatccgaagagcttgttcctttccacctctgacttcggtgtcctctgctcctcctctcccggcatcgccccttccctgtgcaggggcagcgattggggcctcagccttagttcttccagctggaccctgggatggtgcggggctgtggctctgggaagtatcttggcctgcacgcggtttacatcattgggagcacaggcctcgccctccgaactacgaggcccagagcccttcgcgccgagcgtttcccgcctttcccctgtctcaagtcattgcccagaggccactgcgggccgttcctgcctgtccgtggagctgcggcccccgtgttcccagggtgaacgagcacgtgcgaggcggtggtgcttgtatccgggataaccaggtagggcggctgcatgcttcatagaggccagcctgtgccgaccgggagctgtaggacggtctgtgtctggggctgcttatgggtattcgcgtgcgtctgccggtgcgcggtccgagcctactcacgagagcgtgtgtgtgtcttctgtctcgtgttgctatgaggtttgcatctgtgtggctggaatagcttgtttgtgggggcccgcgcgtgacctgtgtgtgcgttactgtgtgtgtctcaggcaggatagtgacgggccgtgtgactgtgacgccatcatcaggttggtgagatggcgtgaccgcgtgctgcctatcagtctcctgtatgttcctccaccatctatcttgatattcagcctgtgatagtctttggtcagcttccatgcctgggaggcttttttggccagccacgcccggctgttaaattgtgacaaagtggtataaagcactgcttgcacagggtcatggattaaaagggtaacgtctgggccaggcgcggtggctcacgcctgtaatcccatcactttaggaggccgaggcaggcggatcacgaggtcaagagtttgagaccagcatggccaacatgctgaaaccccgtctctactaagaatacaaaaattagccgggcgtggtgtcgggcgcctgtagtcccagctacttgggaggctgaggcaggagaatggcgtgaacccaggaggcggagcttgcagtgagccgagatcgcgccactgcactccagcctgggggacagagcaagactctgtcccggaaaaaaagaaaaaaaaaaggtaacgtcttccaacaagggatgtggtattacttttgctggatcacatgtcttatctacctttttggagataatttgtatgtaagtaacacatacataagtattatttctttttacaataggccaccttgtattatttttaacctctccctcatagcatcactccctctgttcctctcttcctgcagaggtaactactataatggattagaaaagtatccttcccgtatatttccttagaattttagtgcatatatccctaaacaatattttctggatttcattaatgccgaagtgtaaattttaacattcggatatcagaatacatcttacggttgctaaagtgtcgtattttaatgatgtatttcttacttgcacatgaaataatagtgtgtcaataattgataacatcttagcatccttgaaatatagtattactgttttgcctgattttgaaatgtatttaagtattatataatatatattcttctacagcttgctttttaccttcaacatatttgtgcaatttatttgtgcttgatatttatagctttgtttataaaacaatggtaattgttttataaataatctattttcattctcctgttggtagatactacagtgtcgctataacactgctgttaatgtgtgaaagaggttttattggttcatacctagaagtgaattttttgggagttggcggtatagttgtcctcagcctcactaatattgttagttaacattcccactattaatgtatgagttcatttttccatttgattctttccttcaccaatccctattgtcaggtgttttttccaaagactaatttttttagagcaattttaggttcacaacaaaattaggcagaaagtacagagattttccatatgccttcccccaaaacctggatggcctcccccattctcaacacctcccatcagtgtggtatatttgttataactgatgaatctacattgatacattgttatcactcaaagtccatagggttcactgttggtgttgtacagtccatacagcataaacctgtagcatagaagttttggcatgctccctggggcgaaccacaagtcaaagggtgaagtgggagagggaagaaaaaactgaacctgtcataatccctatcactcagtgtttttaagataatcctttccccaaattgtactttcatctacacaaaactatgcagggtcaattcatgagactcaccacttgctctacagtatgatttccaatcttttagtcaaaggaagcacaggtctctgagtctgttgaagagattcaaatcctaaacacaactcagcctggttgtggccctggtcattttaatttttatattctgtctctcttaaatagagacaaggtctctccctctcttttattttatatatatatgtatacatatttttattatactttaagttttagggtacatgtgcacaacgtgcaggtttgttacatatgtatacatgtgccatgttggtgtgctgcacccattaactcatcatttagcattaggtatacctcctaatgctatccctcccctctccccccaccccacaacagtccccggtgtgtgatgttccccttcctgtgtatgttacatatgtatacatgtgccatgttggtgtgctgcacccattaactcatcatttatattaggtatatctcccaatgctatccctcccccatccccccaccccacaacaggccccagtgtgtgatgttcccctgcctgtgtccaagtgttctcgtcgttcaagtctcacctatgagtgagaacatgcagtgtttggttttttgtccttgcgatagtttgctgagaatgatggttttcagcttcatccatgtccctacaaaggacatgaactcatttttaatggctgcatagtattccatggtgtatatgtgccacattttcttaatccagtctatcattgttggacatttgggttgcttccaagtctttgctattgtgagtagtgccgcaataaacatatgtgtgcatgtgtctttataccagcatgatttatattcctttgggtatatacccagtaatgggatggctgggtcaaatggtatttctagttctagatccctgaggaatcgccacactgtcttctacaatggttgaactagtttacagtcccacaaagagtgtaaaagtgttccaatttctctacatcttctccagcacctgttgtttcctgactttttaatgattgccattctaactggtgtgagatgatatctcattgtggttttgatttgcatttctctgatggccagtgatgatgagcattttttcatgtgtctgttcgctgcataaatgtcttctttggagaagtgtctgttcatatcctttgcccactttttgatggggttgtttttttcttgtaaatttgtttgagttcgttgtagattctggatattagccctttgtcagatgagtagattgcaaaaattttctcccattctgtaggttgtctgttcactctggtggtagtttcttttgctgtgcagaagctctttagtttaattagatcccatttgtcaattttggcttttgttgccattgcttgtggtgttttagacatgaagtccttgcccatgcctatgtcctgaatggtattgactaggttttcttctagggtttttatggttttaggtctaacatttaagtctttaatccatcttctccctctcttttaaatagaaacagggtctcactctcttgtccaggctggagcacagtggcatgaccatagctcactgcagcctcgaactcaaagaactcccagcctctactgatccttccacctcagcctcccaagtagctgcaccaccatgtccagctatttttttttttttttaacttgtagagacagggttgtgacttgttgttcaggctggtcttaaactcctgagctcaagcaatcttcccaccttggcctttcaaagtgctgggaatacgagtgtgagccaccgcgctgggactcatttaattttataaagaacatatattctaccaccctattctactgtcagaattttattaaaattacctgtgttcttttcataccatagattagacctaaaatggattcccacttcaccccctactgctgctttgattcctgtttccctgcacatacagtgggccacacctgcaaaaatcacaaggctgacttcaggaatcagttttgatcttcgctgttgtaccttaaaattttttttaacttttattttagattcagggagtacatgtacaggtttgttacatggatatattgcatgatactgaggtttggggtacaaatgatcctgtcacccagatggtgagcatggtacccactaggtagttttttagcccttaccccactccatccctccccccagtagtccccattgtctattgttcccatctttatgtccatgtgtacccatgtagtacccttattaactgtgttgtggagcttacacatgagaaaggcactttcttggattcgtgtacatggctcaagagaaaatggttagaactgatagagaccctgccaggccggtagctcatgcctgtaatcccagcactttgggagggcgaaggcgggttaatcacttgaggtcgggagtttgagaactgatagagaccttaattacctggtcgctgttttttcaactgggattccaggaaggaatctctggttagatcccacagtattcacaactgatccttcctgctgttgactgatgggagcaaagctccacccagattacctatctcaattaggttctttgaaactcaggccacgttagggataaaaacaatggaattctatctgtacaagtgactgttactctagtatagggcaatcccatttctcctttaaatatcatctcttttttaaaaatttttagagttgggggtacatgtgcaggttacctgggtatattgtgtgatgctgaggtctggggtataaatgaccctgccacccacgtactgagcacgatacccactggttactttttcaatccttgcccccttttatgttttcattgactcttatgttttggtctttgaagattgcttaactgattttctcccagaagtcagctttaaaatcccattccagaagcttactgacaatttataaggccagaaaagtaaaaagcaagcatatagattggaaagaacaaaacataactggccccatttgcagatgatattatttctacatagaaaatctaaaggaatttacaaacaagaatatcacacacacacatccagtgaagcagttaagtttaaatctaatacatttaccggagctaaaaattacaaaacaatgattaaaactgatgaactcaaagaagacctacataagacacatactgtgtttatggagtggaaggcttagtatagtaaagacttccattcttccacaatgaaataaaggcttaatgcaatttctatgaaaatttaagcagggcttttgaaaacacagacaggctgatccaaaatttatatggaagagcaaagaaagtggaatagataaataaattttgaaaatgaataataggtcaggtgtggtggctcacgcctgtaattccagcattttgggagaccaaggccagaggattccttgaactcaagagtttgagaccagcctgggcaacatggcaaaaccatctctactcaaaatacaaaaattagctgagtgtgctgacacacacgtctagtctcagctacttggcttggagaatcatctgattctgcagtgagctatgactagaaccattgcactccagcctgggtgacaggagtgagaccctgcctcaaaaaaaaaaaagaaaaagaaaaagtaaaaaaatgagagcaatcagtatacagctatagtaatcaagacagtgtggcattgatagagggatagatgcatagatttttggaaaagagcattcagaaacacagaagtaggccaagcaattcaatggagaaacaatattttttttcaacaaatagcactgtaacaagtagacatccaaaaaatgaaccttgacctaaattttattccttataaaaagttaactcaaaatgtatcatagactaattttcacattcagctttaaaatttttgtgtctgcaataaactgaaaacaaaactatttttagaatgcaagtaactgacaaaggatttgtgtccagaatatattgtaacacacacaaaaaagaaaaaaatccattatgaaaaaactatagagatagagaatagactagtaattgccaggggttagggatggggagtgaggaggacaggaagatgggtgtgactataaatggatagaacaagggacctttgtggtgctgtcagttttatagattgactatggggagtggcagttacactaatctgtgcatgagataaaactgtatagaactgtacagacacatacacaagtgcctataaaactggtaatgtttgtggattgtaccaatgtcaaatttgattctgtactgttatataaggtgttaccattaggagaaacgaggtgtggggtacaaggactaaatagtactatacagcattatctgtataacttcctataaatccataattgtttccaagaaaaacatttttgaagttccagtagaaaaaaacagacttaatatatgaatagactattcacagaaaatgaaattggaggcaacatatttgtttttttgtttgttttttgagatggagtctcactctgttgcccaggctggaatgcagtggcgtgatctcagctcactgcaacctctgcctcctgggttcaagcaattctcgtgcttcagcctcccaagtagctgggataagaggcacacacaaccacacccagctaatttttgtatttttagttgagacggggttacaccatgttggccaggctgctcacaaactcctgacctcaagtgatccacctgcctcagcctcccaaagtgctgggattacaggtgtgagccaccactgcacctggccacgacataaatatttgaaaggcctgaatataaaacatctgtggaacagaatgaagtgaatttttcacatccactgggcccttacctggcatacataaaatcaccagcatctgcatccccatttattgatccagaaacaaagaaaagctttgttgagatatatagaaattgcttctactctaacaccaataactattcttggcttgatatattagaatgtaaactatattttacagtatgcatgaatggtctctttccttcactccaaaaccaacccaaatgaaggtggatttctttccccaaatggatagccaattatcccaataataaaataattgttttgtttctatactcaactagaaaaaaatttgagtttaaaattaaaaattggcctcaaataaatgcgaaaatactgctgattttattattccaattaacatgaagagacagtaaacaaaataataccttgtcaggtatgttttgtgtaaagacaatcttctataaatgttagtatctgatcaagaataaaaatccattttaaaattatttctccaggcccaggtttcccccacccatttgattcttatttttgagaaattaggaaaataaaagcaagaaaaaacaattttaaaaacccatataattaatttggacaaccagatttgtcaccactgtcatatttgctttcactcttttattaaagaaatattacagataaatataacaactcccaccaaacctttcccacatcccaaaaggcaaccaagtcatatatggatccatgaccaatacacagtactgttctttgcaagatcttattaaattatacaaatgttatactgtgttcctttgtgcattttaattttttctctcaatattatatattgtaatctatccatataactataggtagattttgtttctaaattctgtattttatcacagaaatgatcacacttattcatctattccacaattgataaaaatttgttatatccaattttgggcaatacaaaccatgattcaggaacacagtgatatatatctctttgtgtacatttgtgggtgcctgtgaggccaatacaccaaaattcaacagactattccatgtttacatgttttttaaagaaatcttgttaccctaaagtaacggattctactttcatcatagttttaaaattttgctttttatattctggtctttagttggattttatttttgtatatgatataaagtagaaagctaaaatttttctcctatgaaccttccatttattaaataagccattcattccccagtgatttcaatagcactgtcatacacagaattcctgtatcttcttggatttttgtatgaatgctcactatcttactactgcttgatttattcacttggtaatacattgtttaaatgacagcagctttaaataagtacatgatatatctaataatagagtgtgtcttctctacttgctttgtcaagtttgtttcagctatttgtgtttctttacttttccacataaaatttttggataagtttgtgaagttccttaaaataaaactgatgtaaacttcagaagtatattaaacttagtgatttgggagagaaattatatttttacaatgtcaagtcttttcagacaaaatatcatttttcaggtgttcttttgtgcctttcaacatattttataacttgataaagacctaactcattgttgtgtttattcttaggttttctatcaacacattttctaattatttcttgtataaaagttatttttatagttcttcgttgatacttgttttccttacttaatacattggctaggagctcaagtgttgtgttgttatgctgatggaagataccttgtttcagatttcaatgagaatgctgattaaatattatcaataagatgtctgctgaaagtttctggtaacagctttttcattatataatttgtcaccttggaagaattctctaatgtttcataaatttgtggctttttcagaaggctatcccacattcatagttttctactctggaagtgatcatgtaatgtgcaatgaggtgttaattccttcagatggccttgccatattcacaatattcatagggtttctaatgagtatgaattctctggtgtctaacaaggtgcgacttttggctgaaagccttgccacactcaatacagtgatagggcttctcacctgtatgttttctcatatgaagggtaagagatgagatttgagagaaggcttttccacatttactacagtcgaagggtttctcacctgtatgtcctcgtatatgtatagtaagggatgagctttgggagaaggcttttccacatttattacattcatagggtttttcacctgtatggcctctcatgtgcacaataagggaagttctttgagagaaggctttcccacattcattacatacatagggcttctcacctgtgtgacttctcatatgtaaattaagcagtgagcactgagagaaggctttaccacatttatcacattcataaggcttttcccctgtatgacttctcaaatgaagggtaagggatgcaatttgagagaaggctttaccacattcattacaatcataaggtttctctccagtatgaactttttgatgtgtaatgaagttttgcttttggctgaaggctttaccacattcattgcattcatagggtttctctccagaatgaattttttcatgagcaatgagatttgatttctggctaaaggctttcccacattccttacatatatagggtttttccccagtatgaattctctggtgtctaacaagatttgacatctgtataaaagctttcccacattcattacactcataaggtttctctctagtatgaattttctggtgtgtaatgaagtttttcttgtggctgaaggcttttctgcattccttacattcatagggtttctcaccagtgtgacttctcatatgtacagtaagggctgagctttgagagaaggcttttccacactcattacattcatagggtttttcacctgtatgaattctaacatgtataataagcatggaaaactgagagaaggctttaccacatttatcacatttataaggtttttctcctgtatgacttctcatatgaagagcaagggatgcaattcgagggaaggctttaccacattcattacatgcataaggtttctccccagtatgaactttctgatgtgcaatgaggctttgcttctggctgaatgcttttccacactcattacattcataaggtttctctccagtatgaattttttcatgatcaataagatttgatttctggctgaaggacttctcacattccttacatgcatagggcttctctccagtatgaattctttgatgtctaatgagatttgacattttaatgaaagctttaccacattcattacatttgtaagactgctccctactgtgaattttataatgtttaataagtttttccttgtgactgaaggcttttctacagttactacattcatagggcttctctccagtatgaattctcagatgtctgatgaggtccaaagtctgattgaagccttttccacaatgattacacttaaagggggtaatgacaaaatgggatgagctattaccatatgatttcacaggttcattatattcacaatgctcctttctcataaggcatttcacattattatgacagtcaaaattatgttctaaacactttccaaataagtcatactcatagagattgtgtctggaagggaaaaaatcagagttcagaggaaatacatttgcaaatttcttttgacattcattgcctttttcttcagtcagtgttttctggaatttaacttcaacttgtctcaaaagtctgtcctggtttttctgatgctcatcaactccccatatttctcctaaaacagattgcaaataaatatcacttacaaatttttttccaatattgtaatatgaagaacattttgaaaaatatgcaattatgggactgattattggtttaagccctactctcccactattaaaacattttcaactgcatatatctcttatctctgaagttctgagaaggaaattcaggaaaggaaatatgagtagaggcatatatttataaatacaaatagctttgattgctttaaaaaatgatctgatagaaaacaaataggtaaataaataggaaatgcagaatgtacaaatgaagtaagaagaaataatgatagagaaaaaacaaaaacaggaagctaaaaagtataagatcattttgcgggactctattaaaatacatttttataatctaaacacttttctggattgtaaattactaaaactgacactacaagatgcaaaaaacttatctaaaccaatttccataaaatgaaaagaaatatgaaaagtaattccctaaaacaaaaaggaaaaacccagagatccacatgaaaattctaacagattttaaaggacaactcctatgctgtctaaaatgttgtgaaagaaaaaagacaaaaattcctgatgtttttgtgtatgaaacatatattaataccaaaacctgacaaagatgacacaccaaaaaagcaaactatccgatttcatttatgaaaaccattgtaaaaattctatgtaaaacatcaaaatgacccaaaaggaaaaaagtgacccagaagcacattaaatataaaatatatcatatttgagttgagtacattttttccagggatacgtttcgataatagaaagtatattactataaataaattaatgaaaaatgtcaagtaatgacatttgaaaaaatgaaaaaatcaagtaatcatttctgtagatattaagataataaaactcaacatctatttttcatttaaaaatcctttatataaaataggaacaaataacatttaatttgagaataaagtacagtacagcccaaacaccagcactttacttaatggaaaacatccagaagcattcacattaaagtcagaaataagaaaagatgagttgtcaccactcattgcagtactaggtagtacaattaaataagagaaataaatcagaggtatgaaaattaagaggccgggcgcggtggctcatgcctataatcccagcactttgggaggccaaggcgggcggatcgcgaggtcaggagattgagaccatcctggctaacacagtgaaaccccatctctactaaaaatacaaaaaaaaaaaaaaaattagctgggcatggtggcgggcacctctagtctcagctacttgggaggctgaggcaggagaatggcgtgaacctgtgaggtagaggttgcggtgagccaagatcacgccactgcactccagcctgggcgacagagtgagactctgtctcaaaagaaaaaagaaaaagaaaaaaaaaaagaatattaagaaaagagttgcccctcttttcttaattaaaaggcgtgagtgcagtggctcacgcctgtaatcctagcactttgggaggctgaggcaaacagatctcttgagctcaggagttcaagaccagactgagcaacatggcaaaaccccatttctacaaaagatacaaaaattagctgggtgtagtggtgcaagcctatagtcccagctactagggaggctgagatgggaggatcacctaagcctgggaggttaaggttgcagtgagcagagatcaccactgctctctagcctgggggaaagattaagactgtgtgtcaaaacacaaaacaaacaaacaaaaaaacaaaaaaacaaaaaaaaaaaacaggaaaagaaaatgaaaattaacattatttgtcagaaacaaaactgtttacctgaaaaatcaagtcatctgaacaattgtgaaaagtaagaaattcactacatatgaattgatatttatttttaaaaaccttcatatacaaacaactacagtcatccctcattatctattggggactggttccaggacctcccgtggataccaaaatccatggatgctcaatgccttacataaaatgataaaagtattttcttataacttatgtgtatctttctgtatactttaaataatctccagattacttataatactgaatacaatataaatgctatgtaaatcattgttatactataatttaaaatttgtattattttttattgttgtattgttattttttgttgcttttttcccctgaatattttcaatttgtagttgcagaaagcatggatagaaagggctgactatatttagaaattatagaattaaaaactacatttacaatgacaacaaaaagtatgaaaaatatacaaaaataaaaaatgtccaaaaaccatatgaagaaaagtttaaaatgaacacacagacttgaacaaatagaatggtgttatggattgaattgtgttatggattgaactgaagtcctaactcctagtgcctcagaatgaggcttcatttagaaatagggtcattgaagatgaaattagttaagatgaggtcaaactggaataagagaagcccccatgcgatacgactcgtgttcttagaagaagaatgctacatgaagagacaagagacatggaagaaatgccatgtgaagatggagagacagagtagagttatgctgccacaaaccaaggaatgtctggggataccagaagctgaaagaggcaaggaagaatccttccctacaggtttcagagggagtatggccccactgacaccttgattttagatttctggcctccagaactgtgagaatagttattttttttattttttagagacagagtctcactctgtaacccaagctggagtgcagtggtgtgatctaggctcactgcaaccttcgacgctggggttcaaaagattctcctacctcaacctcccaagtagctgggactagaggcgtggttaatttttttgtatttttagtagagatggggtttcaccatgttgccctgggtggtcttaaactcctgagctcagatgatccacccgcctcggcctctcaaagtgctgggattacaggcgtgggccaccacacctggccaattcctgttatttctaagttacccagcttgtggtactttgtttcagcagccctaggaaactaagaaaaaggcattaaagcattttagacaagaaaattcaatggcataaagatgacattcgtaagttaatatatcagtttaaagcggtttcaataaaaatgtttgaaaatagctcaaaggaaaatgatactgggggttgccaccatagaagggaaaaatgtgtaagagaagaattacttttcaacatatatccttttgtactttaaaagttctgttctggccgggtgcgatggcacacgcctgtaatcccagcaggttgaggcatgtggatcatgaagtcaggagttaagagactagcctggccaacatagtgcaacccggtctctactaaaaatacaaaaattagccaggcatggtggcacgtgcctgtagtcccagctactcgggaggctgaggcaggagaatcgcttgaacctgggaggcggaggttgcagtgagccaagatcgcgccactgtactccagcctgggtaacagagtgagactccatctcaaataataataataataataataataataataataaaataaagttctgttctatgagtatgtgtttatatccagtctaaacaaataaaattgttctgaacactgcaataatcaataaaatgagaagaaccaataggaaggttaaaaactggatgacggaattggaacataaaactggagaggcccacctaggttaattgtataggggcaaatatagtgaccatagggaaaagaaatagtaagaagttgaggttaaatatggtataataaatacatgagtttagctcagattctatccaaaagtgcacaaatatggtatcatttaaaaggcataaaccaacgaagacaaagaccataacagacaacaatggatgatagatgtaaacataattttagcagatggaagaagatgaaaggactattatctaacagaagaaccgagaacgctaaaacccatgtgcctgcagacgaagatgtcaaaaagcaagttcctactatataactaaagaaaggctgagaaattagagaagtcatgcaccatgaaaggtgggaatgaacaggggccctaaaaaataacaaaattgaatggaagtctgtaaggcaaacaattgcctgcactgtgcaatgaggtacctatcactcccaagagaagatgggaagactactctctgcttctggagaaatggaaccagatagactctagagtcagggacaccaggcagaagactacagggaacctaaactggctcaaacaaggatatcaagcaaaagtttacgtacttaataaggctgagatgttcagttccctattgctgcttacttccaataggaaaatggaaatttttctcctctctgccagcatctgttattttttgactttttaataatggccattatgactgttgtgagatggtatctcattatggtgatttggatttctctaacaatcagtgatattgaactttctttcataagcttcttggccatatttatgtcttgaaaagtgtctgttcatgtccgtttaatagggctgtttttttcttgtaaatttaagttccttatagatgctggatattaggactgtgtcagatgcatagtttgcaaatattttctcccattctgtaggttgtatgtttactgatagtttacataaatgataatcttgactaaatatattacaacgaatatacaaaaagataataaattaaaatctacaaatcaataattcaaaatagaaacacaggcatacttcagagatactgtgggttcagttccacaccaccacaataaagcatgtcacacaacatttttggtttcccagtgcatataaaagttatgttggctgggtgcggtggctcacgactgtaatcccagcactttgggaggccgaggtgggtgaatcatttgaggtcaggggttcaagaccagcctggccaatatggtgaaaccctgtctctactaaaaattcaaaaaaattagccgggcgtggtggcaggcgcctgtaatcccagctactgggaggctgaggcaggagaatcgtttgaacctgggaggtggaggttgcagtgagccgagatcatgccactgcactccagcctgggtaactaagagagactacgtctcaaaaaaaaaaaatttaatactatatacttagtctattacgtatataacagcatcatgtctaaaaaatgtacaccttaattttaaaatattgcttaaaaatgctaacaatcatctgaaccttcagtgagtcataatctttttgctgataggtgtcttcctcaatctcaatgttgatggctgctgactaatcaaggggggattacagaaagttggggtggctgtagcaatttcttttttcttttctttctttttttttttttttttttttgagacagagtctccctctgtcgcccaggcaagagtgcagaggctagagtgcagtggctcgatctctgctcactgcaacctctgcctcccaggttcaagcgattctcctgcctcagcctcctgagtagctgggattacaggtgtgcgccaccacgccaggctaattttttttgtgtttttagtagagacggggtttcactatgttggccaggctagtctcgaactcctgacctcgtgatctgcccacctcggcctcccaaagtgctcggattacaggtgtgagccactgcgccggccccaatttcttaagataacaatgaagagtcacattgattgacttttctttcacaaaaagtttctctgtggcatgtgatgttgtttgatagtactttacccacagtaggacttctttcaaaactgtagtcactcctctcaaatcctaccactgctttatcaattatatttatggaatattctaaatcattgatttccacaatttgcacagcatcttcaccaggagtagatcctaaagaaatgactttctttgttcacccataagaagtaatccttatccctgcaatcacgagactgcagcaattcagtcacatcttccggctctacttctaattctacttctcttgctagttgcacatctacaattacttcctccactgaagccttgaatccttcaaagtcatccatgagtgtcgaatgaacctctttcaaactcctgttgatattctgatctcctctcctgagtcatgaatattcataatagcacctggaaacataaatcctttccagccagtttttacactttttaatttactttacccagatccatcagaggaatcattacctatggaagctattacattacagaatgtatttcgtaaataataagacttgaaagtcaaaattactgcttgatccatgagctgcagaatggatgttgtattagcaggcatgaaaaccaacactgatctccttgtacatctccattagagctcctgggtgaccaagtgcactgtcaatgagcaatactattttcaaaggaacttttttttctcgtgagcagtaggtatcaacagtgggcttaaaatatttagcaaatcaatgctgtaaacagatgtgctgtcgtccaggctttgttattccatttatagagcacgagcagggtgtatttagcataattcctaagggccctaggattttcagaatgggaaatgaatactggctccaacttaaagtcaccacctgcattagcccataacaggagggtcagtctgtcatttgaaactttgaagccagccactgacttcacctctctagctgtgaaagtcctagatggcatcttcttccaatagaaggctgttgcatctacatcggaacgctattgtttagttagccaccctcatcaataatcttagctagatcttctggataatttactgcagcttccatcggctcttactgctttaccttgtatttttatgttatggagatggctctttccttaaaccttatgaacctacctctgctagcttcaaacttttcttctgcagcttcctcacctctaagccttcatagaattgaagataattaggggcttgtcctggattatgctttggcttaagggaatgctgtggctggtttgatcttctacccagacaactaaaactttctccctatcaacaataaggctattttgctttcttatcatcttatcatttgtgtgtatactgtagtggcacttttttttttttttttttttttttgagacagggtcttgctctgtcacctaggctgggatgcagtagtgtgatctcagctcattgcaacctccacctcttagactcaatcaatcctctcgtctcagcctcccaagcagctgggactacaggcatgcaccattacatccggctaatttctgtatttttagtagagacagggtttcaccatgttgcccagtctggtcttgaactcctgggcccaagcaatccaccggcctcagcctgccaaagtgttaggattacaggcgtgagccaccacacctggccagcactttaaatttacttcaagaacttttcctttgcattcacaacttggcaaacacaaaaggctttgcttttggtctatcttggcttttaacatgctttcttcactaagcttaatcattcctagcttttaatttaaagtgagagatgtgcgactcttcctttcacttgaacacttagaggtcattgtagggttattaattgccctaatttcaatattgttgtgtttcagggaagagagagacccagaaaaagggagagagacgggaatgggtggtcagtagaatagtcagaacacatacaacatttaacatcaattaagtctgccatcttacatggatgaagtttgtggcaccccaaaacaatgacaacagtaacatcaaagatcactgatcacagatccccataacagataataatataatgaaaaggtttgaaatattgcaagaatgtgacacagacacacacagtgagcacatgcttttggaaaaatggtgccaatgggcttgttcgatgcagggctgccacaagccttcaatttataaaaaaatgcaacatttgccaagcacaataaaataaagcataataacatgagatatgcctgtataaatgcatgaggaagaatcattgagaaaacagaaagggtataaaattttaccagcagaaccaaggaaataattggaagagaaaaagaaaaccaccattgaaatgaagaatattatggtgcggggggaatagaactttcaccattagaattacggtacagcaatgtcacactgcaaaacaaggtaatggataagacagacattctgatgcatcactgggtctacaggacatagcacaaacctccaagaatacctctctacccacctatcccacacaaaaaataaacaataggaaaacaagcaactgttagctaaaatcagagaacactacaaataatttcataccaaaacatttgaaaatacagatgaaacaaattttcaaatataatagatgatcctggaatatcaatgtgtggtaactttttacagatacagaggaaattttaatatttatggaagttactttgtcaactctgaaaatttgaagactagaattaagtgggtaatttcatggaaaaatacaacctattatcaaaaactaatgccaaaagacaaaaatatatttacatacacataggatagttataaaaggaaaaatgaaaagagttgtcaaggaaacttccctcagaaatacacaaggtcgaaatagttcaacaggtaacatctaccaaattttctagggagttttaacactaatgctatataaatgctctagagcatgaaggaaagcttccaaattctatttataaaaccagtctaacattgacattaaaaactttaaaagtataaacaattatttaaattcatagcaaacataagaggatgagtcattattgagaaatatctaaacataattgaaccatatacattttaaaaattgtgataatctcctataggaacagattgttttaactacatgaattattttaaaaagtcgaggtggcaaaaaagtacttcaacgaggaataatctctttgggaaaaaaacacaagaaaaacatatgacagatgatgtgccaatcagctcaatatgttaagagttcatacaaattaagaacttgacagaaacaagggcaaaggataccaactgtttattaaaacaaagaaatatagattggaaacatgaaaagatgcttgccttcactcatcataaaggaaatgtaaattcaagctataattagctaccatttttcacctcagtttggcaacgatttttttaaatgctaacagactacactggttgaagttactggtggaaatataaattattacagtctctttggagggcaaaaatgactttataaaattcaaaatacgtgtatatggacatatatatgtatatgtatatatgtatatgtgggtatatatagatgcacacctacattacatacacttgcatatgtacatgacaaatatatcagaaaatgggagctaccaaaaaatcagcactgacttaaaacttttattgaaataaagggtggtagtgattattgaagtatgagagtaaaacctaaaaatacagtgggaagtatgactgtacgacatttcagacatttacaatggaagaaagaagagaaagtaagggactataaatgtcagtaggtttgatttaacaactgcaaattagtgaatgtatgcaaaaagaaaggatcctgtatatgagggtggatggtactcccgaagatgctaataatagaatgaatatcaaagtaagcctggaaacttattaggaaaggttggtatctagcacacaggtaagaaagccaaccagatctctaagttctgaggaaagaaattaagaatggtatctagaaatgacatcttaggtttataaaagagtttgcatcaatggtcacttttgtactacaaaagtgtacatcaggccaggcgcggtggctcacgcctgtaatctcagcactttgggaggctgaggtgggcggatcacttgaggtcaggagttcaagaccagcctggccaacatagtgaaaccccatccctactaaaaataccaaaaagttagccaggcatggtggtgcatgcctatagtcccagctactcgggaggctgaggcatgagaatcgtttgaacccaggagccagaggttgcagtgagccaagattgcaccactgcactccagcctgggtgacagagtgagactctgtctcaaaaaaaaaaaaaaaaaaaaaaaagccgggcatggtggctcatgcctgtaatcccaacactttgggaggccaaggcaggcagatcacgaggtcaggagatcaagaccatcctggctaacatggtgaaaccctgtctttactaaaaatacaaaaaattagcagggtgtggtggcacgtgcctgtagtcccagctatcaggaggctgaggcaggaaaatcacttgaacctgggaggtgggggttgcagtgagccgagatcgcgccactgtactccacagtgacagagtctcactctgtcacacacatacacacacaaaaggtctacatgctttctgaaaatatatatatattttttgagacagggtctcactccgttgcctaggctagagtgcagtgctgtgatcatggcttactgtagcctcaacctcctaggctcaagtgatcctcccacctcagccttccaagcagctgggatcataagcgtatgccaccacacgtggctaatttttttttttttttttttttttgacagagtcttgctctgtcgcccaggctggagtgcagtggcgcaatcttggctcactgcaacctctgcctcccgggttcaagcgattctcctgcctcagcctcccaagtagctgggactacaggcgcgtgtcaccacgccaagctaattttttgtatttttagtagagatggggtttcaccgtgttagccaggatggttgtgatctcctgacctcatgatccgcccacctcggcctcctaaagtgcagggattacaggcgcaagccactgtgccaggcccaatttttcttttctcttttttttttaagagatgaggtctcactatgttgcccaggctggtcccaaactcctggactcaagcaatccttccaccttggcttcccaaagtgctgggactataggtatgaaccactgtgccaacctctgaaaatatctttgaagaatattttagagggatcaaccattcactgattaatcattaataggccctgacctctcctcacctgtctggttcccttccactaaccttgccagtgtctccttaatacttcttcctccatcacccatggttcttcttcttgctccaatttgaaaatcacatcaggtttggtgaacggatagcctgtcaaagggaagttacatagatttgggcatacatactaggaacaaagaaccacccaaaaattgaggctggcccaggaaaaccaggctaaaggacaagaaaatgtggcttcgggggttctgtccccttttgctctgaaaactgcagcatggacattcacatgagcaaaagcatcccaaggccaagctcactctaatatttaaaaggtccatgtatttcagaaacactgggaggaaaaaaaaggtactttctttccagagtttgaattatatagtaaattactcttacctactgtgattaagttgttatagttttctagcatcacattccggtacagttttctctgagcaggatccaatctcttccactcctcctgagtgaagtcgatagccacatctttgaatgttactgttccctgtaacaacacactcccactcaatctgaagtcatccatcttgggtgattgtaaacaaaatatattgaaccttgttctgatattaatcagaggttattaaaaaagcccatcatattagcagcatcctgtcatttatgttcattcactgattagcaagcacatgtctttaatatctaccatgagttaaaggggagattttaggtaccaatttatattgagtgtgaaagaaacataaaaataaaactttaaccaagttaagtggtttgagatctcacaagataccaaaggcaggaaaaaatgaaagcaaggcttagatggaagcagaagcaggggacagaatgataggtgaaatctgtggtatggtgggacatgcaactggagatagccactgatttagcagttggatgtattgttcatgagatcaggagaaatccacattggaaatgaagatttatgggtcatcagcctgtagtatgtgtctgcagccatgaaaatgggatctgattgttcaaatagtttacatgtactggaaaaggggccacagatagaatctcagagacaaccatgaaaaaacacatgccctgatgacaatttgttttttaatggtcagaaatagaattataactgaaactgtgtatttaaaaagctgtagaatggctgggtattacatggctcatgcctgtaatcccagcactttaggagactgagacgtgaaaatcccttgagcccaggagttttgagacgggcctgggcaatgtggcgaaaccgtctgtacaaaaaatacaaaaattagccaggtgtggtggtgtgcatctgtagtcccagctagtcaggaggctgaggtaggaggattgcttgagcccgggaggtggaggttgcagtgagtcgtgattgcaccactacactccagcctgggtggcagagcaaggccctgtctcaaaaaaaaaaagctattgaatgaatttcaaaaaaactggtgaacttcttaaaggcaatgtgatttgaatatagaaatctaatgcactcttcctagttcaaaacagaaatgcccaaacgtatatgaacataagaaaaaatcttaaatagcactcagcctggaaaaaagggagcaatccatatttcctactgtttcaggaatttctaccagaaactaggtgagaaaaaagaaagtctccaatagctcgttcacaatgtatctaagaatttgtttctaggtcctaaaaggaacttatgagcatgaacatccattaacactaagggctcagagaaagctgtggtactgatgggagatcagctcctgaaagcccttcctgctgaaaatcatgatgcttgcaataaacatgttcaagaagcaaaaggcaaagtgtcagaggaaaaaaaccctgaaatccaggggtttttaatatttcccctcatctgggaggaagatccaaataagcctggataaagcatttggtgaggaagtgggactgaggagaaagcatgatgtggaaatctggccctggtataatagtttcaccaattacagggaagaacatgagcacataagaaacacactcttgctgggactacctcagctgcagactttttcctcaggaagttgtattttcttcaggaggtcagatcattaaactagtaaataaattttaaaaatcagcaccaaagattttacaagaaaatcctaattgcccctagctcaagagtgagagaatcccaaaagaaatcattaaaatacatttgaagaaaatacttgggaaaaagaatttagtaaatgcaaaaacagaaacaatttaaagtgaaaaatttagaacttacatatacacaaatctccatatttaaaagctggagctaggcgcggtggctcacgcctgtaattctaccactttgggaagccgaggtgggagaactgcttgaggctagttcaaggccagtctgggcaacatagcaaaacctcatctctacaataaatgaatgaatgaatgaatgaatgaatgaatgccgtgtatggtggtgcgtggctatagtcccagctacttgggaggctgaggtgggaagactgcttaagcctgggagtttgactgcagtgagccatgatctcaccactgcattagagcagcctgggcaatagaacaagaccctgtctcttaaaaaaaaaaaaaaaaaaaaagctgatagtttaagaagaatgaattaggcaaatgtttagtaagtttaaggaagaaaaataaacatcccaaattaggaaaaaacattaaaactaattgatatttaaagtagtatatatctgtggttgaatttttttttttttttttgagatagagtctcgccctgttgcccaggctggagtgcagtgtggcgtgatgttggctctctacaacctccgtctcctggattcaagtgattctcctgcctcagtctcccaaatagctagaactacaggcgtgcgccaccacacccagctaatttttgtattttcagtagagacggtgttcccatgttggccaagctggtctctaactcctaacctcaaatgatctgcctgcctcggcctcccaaagtgctgggattacaggtgtgagccaccacacccagcctgaaatttttaaattcataatgaaatgaataggttaaagggaaacataagcctaagactgatcttaaaaaaaagaagaaaatcccaacagtgcaatactatagcacccactgttattcttctattccaatatttattctgtcttcccaatttctggccaggcacatggtctgctgaaataagtattaatatgtttatatgataatgttctggacagtgagatgaaaggactgcatgcaactgctgataagtgaacataaaggcacgaggtataccatttctcctaagcttctaccttcctgtagactggtaagtcaatgcgacttaccagagtcgagagcaaacagagccatttgagataataaggcagaagccaacaaccaagaatggcagagcaatgaaggagaaagagtttcgttctctgccctttggagctacaggaccagccttgaacttcaatatgagagacaaataaacttatgtcttgtttaagcaaaggttatctgggctttctatcacaggcagtcaagtgtaatactaacagattaatatgttcatgccagatctggccatcctttggcagctatgaagggatggtgctcgaatcctctttaagggaatccactgtgagaagcatagttggcaaacagcctccagctgctccactttcatgctgaggtcatgacaccccaacactgcttccagccacaggctcagcatagtgaggctattaaagtctggactattacacttgatatggttttcctctagtgggaaagctttggtcagcaactcccctttggcctggctgagactttctcacaacttcaggatggtctgagttggcagaaaaaagtattagtaaacttgaagacagatcactaaaaatgatgcaatttgaagaagagacagaaaaaaggatgtagaaaaatgaatacaggctggacacagtggctcacgcctgtaatcccagtgctttgggaggccaaggtgggaggatcacttgaggctaggagttcaagatcagcctgggcaagatgatgagaccctatctctaccaaaaaatttaagaaatcagctaggtgtggtggcacatgcctatagtcctagccactcaggagacattggtgggaggattgatttagcccaagagttcaaggttacagtgagttataattgtgccactgcactccagcctgggtgacagagtgagaccctatctcaaaaaaaaaaaaaagaatatagactcagaaatgtgagctagagcaataagtgcattaacatatgcataatttaagtataagttagagaggagagagaaaaggacagaaaaaatcaaagaaataatggctgaaaacttcccacatttgatgaaaaacattaatgtacatattcaagctcaatgaattccaagtaggataaacgcaacaaggtacacacctaaacacatcatagtcaaaatgttgaaaataaatataaagagaaaatcttgaaaacagcaagggaaaataattcattatcttcaccaaccacaataaaactaatagctgacttctcatcaaacacaatggaggacaaatagcaatgggacaacatattcaaagttctgaaagaaaaaaaaaactatcagagaggaagtagggaaagagggcccaatagaagcctccaccgatcatactccccacaggaacaccaaattgaacaactatccacacaaaaaagcaccttcatcataaccaaaaatcaggtcagcagtcacagtatctggttttaacttcacatcactgaaagaggcactgaggagggtaggaaagacagtcgtgaattgctgatcgtgaattgctaacgccatccctcccctattctccggcagtggccatatggttctgagagagaatctgtgcacccgcaggagggagaccagagtgattgcaggacttttcattggaactcagtggtgccctgtcacagcagaaggcaacaccagggagaacccagttggtgcccacaccagaagtatttggaccagccccagccagtctaggggaattgtccattgtagcagtaggaacctgaattctggcaagcctcaccaccatgggctaaagggctctaggatcctaagtgaacttgaaaggcagtctaggccacaggaattgcaattcctgggcaagtcctggtgctgtgctgggcttggagccagtggactagggggtcatgggacccagtgagacaccagccagggtagccaagggagtgcttgtgccaccctttccctaacccgaggtagtgcagctcgcagctccaggagagaccccttccttccacttgagaagaggagaaggaagagtaaagaggactttgtcttgcaccttggataccagctcagccacagtatgatagggcaccaggcagaggcccccattccatgcgctagctcctggatgcaacttctacacacaccctggaccagaagggaacctgttgccttgagaggaagaactcagtcttcgcagcatttatcacctactgactaaagagcccttgagccctgaacagtcagcagtggtagccaggtagtactcaccatgggccttgggtgagactcagagacatgctggcttcaggtgtgacccagcacatttcccgtgtggtggctacaaggagagactcctgcttgagaaaaggagagggcaaagtatagggaactttggtaccaacttggccacaatggggtacagcaccaagtgggttcttggggtccccaattccaggccttgcctcttgcatggtatttctggacctgccctgggccgaaggggagcttgctgcctgaagggagaatcccaggcctggcaacattcaccacaagctgactgaagagcccttgggcctggaatgaacactggcggtagccaggccatacttgccatgggcctgggtcagtggtagccacggggagaaattcctctgcctgtggaaaggggagggaagagtgggaaggactttgccatgtggcttgggtgccagtccagccaccgtagaataccaagtacattcctaaggtttctgactctaggccctggttcctggatggcatctctggacctgcccgtggctggggggaacttgctactctaaagggaaggaaacaagactggctggctttgccacctgctgactgtagagtgatagggccttcagtgaacacaggtgatagccaggcagtggttactgtgggccttgggtgagactcagtgctgtgctggcttcgtctgacccagcgcagtcccagtggtggtagccacaggggtgcttgtgtcacccctcccctagctccaggcaactcagcacagaaagactctgggagaaagtaagacaacaagagtctctacctggtaatccagagaattcttctggatcttatctaggaccatcaaggtggtacctctatgattctgtaagagccacagtgttaactgggcttggcatgccccctgatgcagatatggttgcagtgaccaaaaacttagatcacaacacccaagtcccttcaaatacctggaaagtcttgccaaaaagggcaggtataaacaagctcagactgctaagactgcaataaatacctaactcttcactgcctagacatcaacaaacattcacaggcattaagaccatctaggaaaacatgacttcaccaaattgaactcagtaccagggaccaatcctggagacacagaaatctgtgacctttcagatagagaattcagaatagctgttttcaggaaactcaatgaaattcaagataacacagagaaagaatttagaatgctatcagataaatttaacaaagagactgaaataattcaaaagaatagagccgaaattctggagctgaaaaatgcaacggacaaactaaagaatgcatcagtctttttttttttttttttttttgagacagagtctctgtaatccaggctggaatgcagtggtgtgatcatggctcactgcagcctcgacctgccaggctcaagtgatcctcctacctcagcctcccaaagagcagggaccacaggtgcatgccaccatacctaactaagtttttaatgtttttgtagagatggtagtctcactacgttgcccaagctggtctcaaactggtctcaaactcctgggctcaagtgatcctcatgctttggcctcccaaaatgctaggattgtaggcatgagccaccacccccagtctgttcagtcactgaacaacagaattgatcaagcagaggaaagaattagtgagcctgaagataggctatttgaaaacacacagtaagaggagacaaaagaaaaatgagtaagaaagaatgaagcatgcctgtaagatctagaaaatagcttcaaatgggcaaatctaacacttattggccttaaagaggaggtagagagacaggggtagaaagtttattcgatgggataacaatagagaacttcccaaacctagagaaagatattgatattcaagtacaagaaggttatagaacaccaagtagatttaaaccaaataagactacttcaagacacttaataatcaaactcctaaaggtcaatgataaagaaaggatccatttaaacacagcaagagaaaagaaacaacataccaatggaagctccaatatgtctggcagcagacttttcagtggaaattttacatgccaggaaagagtggcacgacatatttacagtgctgaaggaaaaaaacttttatgctagaatagtatatctggtgaaaataaccttcaaacatgaaggagaaataaaggctttcccagacaaacaacagctgagagatttcatcaacaccagacctgtcctacaaaaaaatgctaaagagagtccttcaacctgaaaaaaggacgttaatgaacaataagaaatcatgtgaaagtacaaaattcactggtaatagaaagtacacagaaaatgcagaatgttataacactgtaattgtggtgtgtaaactactcatatcttgaatagaaagacgagaagaagggctgggtgcagtggctcacacctgtaatcctaccactttgggaggctgaggtgggcagatcacgaggtcaacagatgagaccattctggccaacactgtgaaacgccatctctactaaaaatacaaaaattagctaggcatggtggcacatgcctgtagtctcagctactcaggaggctgaggcaggagaatcgcttgaacccgggaggcagaggttgcagtgagccgagattgtgccactgcactccagcctggtgacaagagcgagactctgtctcaaaaaaaaaaaaaaaaggaaagatgagaagatgaatcaatataaatacatcaataactaaaacaatgtttcaagacacagtacaataaaatataaataaaaacagcaggttgggcacagtggctcacgcctgtaatcccaaccccttgggaggccgaggcgggcagatcacaaggtcaggagatccagaccatcatggccaacatggtgaaaccctgtctctactaaaaatacaaaaaaattagctgggcgtggagtggcgcaagcctgtagtcccagctactcggtgtcaagcctctgagcccaagctaagccatcatatcccgtgacctgcatgtatacatccagatggcctaaagcaattgaagatccacaaaagaagtgaaaatagccttaactgacgacattccaccattgtgatttgtttctgccccaccctaactgatcaatgtactttgtaatctcccctactcttaagaaggttctttgtaattctccccacccttgagaatgtactttgtgaaatccaccccctgcccgcaaaacattgctcctaactccaccacctatcccaaaacttacaagaactaatgataatcccaccaccctttgctgactctttttggactcagcccgcctgcacccaggtgaaataaacagccttgctgctcacacaaagcctgtttggtggtctcttcacacgtgcgcgtgtgacacttgggaagctgaggcaggagaatcgcttgaacctgggaggcggaggttgcagtgagctgagatcacgccactacgctccagcctggtgacagcgagactccatctcaaaaataaataaataaataaattaaaaagtaaaaacagcaaaaagttaaaaaagcagggggacaaagttaaagtgtagagtactaactttctcttggcctgtttgtttatgcaatcagtgttaatttgtcatcagcttaaagtaatatgttatattatttgcaagcctcatggcaacctcaaatcaaaaaacatacaacagatacataaaaagtaaaatgcaagaaattaaaacataccactagagacaaccaccttcccaaaaaggaagacaggaaggcaggaaaggaggaaaagaagaccacaaaacaacctggaaataacaaaatagcaggactaagtccttacttatcaataataacattgaatgtaaatggactaacatttgaatgtaaagctctccaatcaaaagacagagtggctgaatatattataaaaacaagcaaacaaacaaacaaaaaaacaagacccaaaaatccattgcctacaagaaacacacttcatctataaagacacacatagactgaaaatagatggaaaaatatattcatgcaaatggaaaccaaaaaagagctggactagctatagacaaaatagacttcaagacaaaaactataaaaagagacaaacaaggtcattacatgatgataaaggggtcaattcagcaagaggatataataattgtcaacatgtatgcacccaatgttggagcacccagatacataaagcaaatattattacagtaaaagagagagatagacccaatagaataattgctggagatttcaacattctactttcagcactggacagactatccagatagaaatcaacaaagaactatcagacttaatctgcactacagatcaaatggacataatagatatatacagaccatttcatccaatggctgcagaatgcgcattcttttcctcagcacatagatcactctcaagcatagaccatgttaggccataaaccagtcttaaaacattcaaaaaattaaaattatataagatatcttctctaaccacaatggaataaaactagaaatcaataaggaggaattttggaaactatacaaacacagaaataaaacaacatgctcctgaatgatcactaggtcaatgaagaaattaagaagaaaatttaaaagtttcttgaaataaatgataatggaaacacaacacatcaaagcccatgggatatggcaaaagcagtactaaaaggaaagtttatagctataagcacctacatcaaacaagaagaaaaacttcaaataaacaatttaatgatgcatcttaaaagaactagaaaagagcaaaccaaactcaaaattattagaagaaaataaataataaagatcagagcagaaataaatgaaatgaagaaaatgatacaaaagattaacaaaataaaaaaatcagttttttaaaaaaatgaaatcagcaaacttttagctagactaagaaaaaaagagaagacccaaataagtaaaatcagagatgaaaaaagagacattataaccaatactggagaaattcaaaggatcattagaagctactgtgagcaactatatgccaataaattagaaaacctagaagaaatagataaattcctagaaaatacaacctaccaagattgaaccatgaagaaatccaaaacctgaacagactaatagcaggtaatgagattgaagctgtaataaaaagtctccgagcaaagaaaagctcagaacccaatggcttcactgctgaattttactgaacaattaaagaagaactaataccaatcctaattaaactattccaaataatagaggaagagggaatacttccaaactcattccaggagggcaatattaccctgatacgaaaaccagaccaagacacatcaaaaaaaaaaaaaaaaagaaagctacaggccaatatccttgctgaacattgatgcaaaaatcctcaacaaaatactagcaaactgatttcagcaacacattaaaaagacaatacatcatgaccaagtgggatttatcttagaaatgcaaggacggttaaacatgcgcaaatgaatcaatgtgatatatcagatcaagagaatgaaggacaaaaaccatatgatcatttcaactggtgctgaaaaagcatttgataaaattcaacatcccttccatgataaaaaccctcaaaaactgagtacagaaggaacatacctcaatacaataaaagccatatatgacagactcacagctagtatcataccgaatggggaaaaacagaaagcctttcctttaagatctggaatatgacaagggtgcccactttcaccactgttattcaacatagtactggaaatcctagcaagagaaatcagataagagaaagaagtaaagggcatccaaattaaaaaagaagtcaaattatccttgtttgcatgtgatatgatcttctgtttgaaaaaacctgaagactccagcaaaaaaagtaccagaactgataaacaaattcagtaaagttgcaggatacaaaatcaacatagaaaaatcaatagcatttctatatgccaacagcaaacaatctgacaaaagaaatcaagaaattaatattttcagtagctaaaagtaaaatccctaggagttaaccaaagaattgaaagatctctacaatgaaaattataaagcactgatgaaaaaaattgaagaggacacacacaaaaaaatggaaagatagtccatgctcatgggttggaaggatcaatattgttaaaatgttcatactacctaaagcaatctatagattcaatgcaattgttatcaaaataccaatgacattcttcacagaaataggaaaaaatgctaaaatttatatgcaaccacaaaagacccagaataggcaaagccatcctgagcaaacagaaaaaactggaggagcctgacttcaaattatactacaaaactacagtaaccaaaatagcatggtactgacataaaagtagacacataggccaggaagggtggcttgtgcctgtaatcccagcactttgggaggctgaggtgggagaactgcttgagcctgggagtttgagtcctgggcaacatagtgagaccttgtctctacaaaaaaataaaaaattaggcatggtggtgtgcacctgtggtacttgggaagctgaggcaagaggattacctaagcccaggaggtcaaggctacagcaagccatgttcacacctctgcactccagcctgagcaagagagcaagatcctgtcacaaacagcgacaacaaagaataacaacaagcagacacaaagaccaatggaacagaacagagaacccagaaacaaatccatacatctccagcgaactcattttcaacagcggtgccgagaaatatattggggaaagaacagtgtcttcaataactggatatccatatgcagaaaaatgaaaccagacccctatctcttgccatacacaaaaatcaaatcaaaatggattaaagacttaaatctaagacctcaaactatgaaacgactaaaagaaaacagaggaaattctctaggataatggactgggcaaaggttccttgagtaatatcccgtaagcacaggtagccaaagcaaaaatggacaaatgggatcatatcaagttaaaaagcttctgtacagcaagggaaacaatcaacaaagtgaagaggcaacccacaaaatgggagaaaatatatgtaaactatccatcagacaggggattaataactagaatatataaggagctcaaataactgtatatgaaaaaagtctaataacttgatttaaaaagggggaaagatctgaagacatttctcaaaggacatacaaatggcaaagaggtatatgaaaaggtgttcaacatcactgatcatcagataaatgcaaatcaaaactacagtgagatatcatctcaccccaattaaaatggttttttttgtttgtttgtgatggagtttcgctcttgttgcccaggctggagtgcagtggtgcgatcttggctcactgaaacctccgcctcccgggttcaagcgattctcctgcctcagcctcctgagtagctgggatttgaggtgtgcaccaccatgcctggctcattttcgtattcttagtagagacggggtttcaccatgttgaccaggctggtcttgaactcctgacctcagatgatccacccgccttggcctcccaaagtggtgggattacaggcatgagtcaccatgcccggccttagaatggctttcatccaaaagacaggtactaacaaatactggccaggatgtggagaaaagggaaccctcatacactgttggtgggaatgtaaattagtacaacctgatggaaaacagtttggaagttcatcaaaaaagtaaaatagaactatgatataatccagcaatcccactgctaagtatatacccaaaagaaaggaaatcagtgtattaaagagatatctgtactcccttatttattgcttccttgtttattcacaatagccaagatttggaatcaagctaagtgcccatcaggaaatgcatggataaagaaaatgtgatacatacacaccttggagtactattcagccataaaaaagaagagcctatcatttgcaacaacatggatgcaactggagatcattacgttaagtgaaataagctagacacagaacgacaaagctcacatgttctcacttatttatgagagctaaaaattaaaacaacggaactcatggaaatagagcacagaatgatggttaccagcagctaggaaggatagtgggtgggggaaatggggatggttaatgggtacaaatatagttagaatgaataagatctaatatttgatagtgcaacaggacaactatagtcaacaataatttgtacatttaaaaataaccaaaagagtaaattggattgtttgtaacacaaaggataaatgcttggatagataccctatttaccctgatgtgattattactcattgtatgcctgtatcaaaatacctcatgtacctcataaatgtatacctcatacatgtatacacctactacgtatccacaaaaactaaaaattaaaaaaactaacaacaaagaatcctatatttaggaaacttatctttcaaaaatgaaggtgattatgttaggtgaaagaagccagacacaaaaggtcacatattttattattgtatatatatgaaatattcagaatagataatatagccagaataggtaaatccacagagacagaatgcagaatggtgtttgccaggggctaggagtgagagagggataggggaacagatgcttaatgggtatggggttttattttgaggtgataaaaatgttacagaaccagatagaggtggtggctatacaacactgtgaatgtactaaagaccactgaatcgtagaatgattaattttaaatatgtatgtgaatttcaggtaaaaaaataaggtgaaataagtaaaaacaaagaattcaatgctagcagactagcctcataagaaacacggaaggaagttattcagactgaaaggaagtaacaaaaaacaattaaaatccacatgaaaaaatgaagagctccaataaagcactaagcagaatgcagagcacacaatgataagtatatatcagctgaactaatttcattttcttaggtactctgccctacatttctggagaagtgaaccttttatttgtagatgaagacttaatatggcaacaaaagaacaaataaatgtgatatccttcctctatgggctaattttcttctttatcaatgcgctttatcaccaagaatatcttgagaccttccatggccttattttatactaccttggcctctactcagcactcactggctccaaacacgtttaaccagtatactagttttgaagtacattttaatctatgtttccttatgcctcatacattttctccacttaactttattgaaaaaggaaagacagaggagaagatgaaaggggaaaatcctctccttcctcttacaggcctggaatagaggaaacaaaggccttgaaggtagggaggtaatatgtgcctagaactccccacactctaaggcatgagtgtgaaatgcaagagaagcagtgagttaagtgggaaaagtgtcatgtcaaactgagagaataacttctaagtagctttcagttcccatgtagcacagaccctgagtaggatgaagtagggtcatttcagaaggcaaggtgaggctgggcatagtggctcatgcctgtaatcccaacactttgggaggccgagaggcaggaggattgcctgagcccaggagttcgagatcagcctgggcaacatagtgggaccttgtctctacaaattgtttttttaaattagccaggcatgggggcacgtgcctgtactcccagctacttgggtagctgaaggcgggaggattgcttgagcccagcaggcagaggttgcagcgagctgagattgtgccacgccagcctgggtgacagagtaagaccctgtttcaaaaaaaaaaaaagaaggcaagatgctcctacatgcatgctgtggggtttaggggacccaggaagcatctagagaatgacagattcagagagatctacagagatagcaagaaccaaaggaggccagttgataaagagaggtccttggaccatcactgagctgtgaaatacaccataaattcatcagccactgaatgtcctgaaaaaggagctagctaaatcatccagcatatacccaagctatgaagatcttccctgttatctcaaacaccactttaacagagaacagggatacaaagtagaatctgaatgactaaataattgtcaagagaacaatttgctgattgaactaagttttgaatcagactgcattaaaattagttttttcattttatcaatcagaactcacaggggatagcagagtgagtttagaaacactctgggcctcttggagcttagattctactttggggacagggaaatgaaaacataagcaagtgaataagtgagataaaatgtgatattgataagttaagaaaatgcaataaaggtaatgggttatggaatgaatcagaaactctactttgaatttagtaaccaaagacaaccttgaggaagatgacatttcagcagaaacctgaatgatgagaaagaaccagtcatataaatatctagggtaggaacatttaaaagcatgttcagagttcttggggcaagacaaagttggtctgctcaaagcggggaaaggttagtgagggtgaaacacagtgaatgagggagaatgtagcacaagataatggtgaagacatgggcagaaggcataccaagaggggctttgtaagggacgttattccacatgtaaaggaaagacactagatggtattaagcagagaagtcataataaaaccttaggtttaaattatcactttggttgttctatggagaatggactatagatggtcaggagtggatacagggagattagtaggcagttgccagagtagttccaggtaagaaatgaagtgacatggattataagatccatggaaatgttgatcagagaatataataatattcagcaatgagattaactgaactacaactagatgcaccaatttaacatggatgaatctcacaaacataatattaaacaaaagccagacacagaatacacagattatataaagttaaaagacaggaagaaacaatttatggtgataaaagttgaacactcctggggtgggggtgatgactaggaagtatagaaaaggtatcctagagtgctagggtaattctgtatttcttcactgagtgtgtgcgctgtgttacacaggtatgttcattttgaaaattaactgagtgtgcctgaggaagaaactggagatatatagaagctggcagataaaaatacatggtcggccgggtgctgaggctcacgcctgtaatcccagcctttgtgaggcgggcagataacccgaggtcaggagttggagaccagcctggccaacagggtgaaaccctgtctctactaaaaacacaaaattagctgggcatggtggcgcacgcctgtaatcccacctactcgggaggctgaggcaggagaattgcttgaacctgggaggcagaggttgcagtgagccaagatcgcatcactgcactccaccctgggcaaaaagtgagactccaaaacacaaaaaacaaacaaaaaaaaccacggtcaaagaaaggtatatctcagaagagcaaagctttgagctgagggtaaaaagtaaaatatgttcagtatctgagagtgtaggataaatctgaaagaaaaccacaagtattcacagaatatcaagtgtactaggtgatcttctaggtactggagatacagcagtaaacaaagtaaaacacactctctgcttacattctagtggttaaaattttaagaatttaccagaaatgattacagtgtggctcaatcagcagcaaatgcccattgaaaaagataattacatagggtcatctgaaagacacacatcccacctctttcttaagatagtctagttttctctctttaaatttacgggccgggcgcagtggctcacacctataatcccagcactgtgggaggtcaaggcaggtggatcacttgaggtcaagagcttgagaccaacctggccaacatggtgaaatcccatctgtactaaaaatacaaaaaaaaaaaaaaaattagccaggcgtgctggtgggtgcctataatcccagctacaatggaggctgaggcaagagaatcacttgaacccgggaggcagaggttgcagtgagctgagatcgtgccattgcactccagcttgggcaacagagcaagactccatctcaaaaaataaataaataagtaaataaataaataaatttatgtatgacatgcatagagtaatgtggtaaaatggactagtcttaagcataaaatctgataaatctgtatacatttatagacatgggtacctaccagtaagtcaaaatacagaacattttcacccctccagatttcttcatgctgtttcacagtaaataccctctcagaggtaaccagtattctgacttctatcacaatacattagttttgcccattttcaactttatatgaatggaaccctatgatatatacttttttgtttctggcttctttcattctatgtttgtgtaatctatccatgttggttgttgcgtgtaacagtcatctgttcttttttattgttaagtagtatttcaccgtgtgaaatactataatttattccttttcctgttaattttcatttgcattgtttctaatgctgggctattttgatagttacactttgttttatccttgatcgaaagagaacatcaaaagagctaggtttatcaactacaagaagtaacactacaatgttttcattgacctaggtatcaatgaaaagcttatttctgttagaaaatgttgattttttattgttacaatgaaaattatgtaacaaatttttgctctggttttctttacctgtaaaaaggaaatttaaatttgaagcccagctttaatctctctgaatgaatttcataaaatacccacattttaactcttccctagttttaatcgttcaactctatttcccctgaaaatatgttttatgtatacagacctttataatttactgtatgaattactgcaatccccttaaattgcattggagagtaaggcaagaaacaaatacactatttaacatttacctgggactcagtcatttcctcttctttctgggaagggatggggcctgcagaagtagagctggggaagagaataaaagtcattaaaataggcctgtctttagtttcagaaacatgcacacacagggtggattaaaggtcaccctgtagtggaatgataattaaatctatcagaaatgccaagaatattcataccacaaaggttcttaataggtgtgaggatgattggaataatcatgcagagcttgggcacagggtggatagaaacaggggtgcgtatgtgggagctctgtatcagagaatacatgtagcatcatgaaagcatatatgcaggaaaattatgaaactgacaaaacacctaaagtattttaaagtattgagacatttaagacagtcataattagcaattaaaaaagaagtagcaatttaaaagaatttaaaaggtgatatatcttgaggaacaaataaaaagtttttatgtgtgagtaatgtgtatcggaggtactgatggtaagagagttaaatccgtacttttccctagccagagcaatcagacaagagaaagaaataaaaggcatccaaattggtaaagaggaagtcatactgttgctgctgctgatgacatgattgtatacctggaaaaccctaaagattcatcccaaaagctcctagaactggcaattgaattcagcagtttcaggacacaaaattaatgtacacaaatcagtagccctgctatatgccaacagcaaccaagctgagaatcaaatcaagaactcagccccttttacaatagctgccaaaaaaaataaaatgcttagcaatgtacttgaccaaggaggtaaaagatctctataaggaaaactacaaaacattgctgaaagaaatcacagataacacaaacaaatggaaacacatcccgtgctcatggatgggtataatcaatattgtgaaaatgaccatattgccaaaagcaatctacaaatttgatgcaattcccatcaaggtaccaccatcattctacacagaactagaaaaaaaaacaatcctaaaaatcatatggaaccaaaaaagagcccacatagccaaagcaagactaagcaaaaagaacaaatctggaggcattacattatctgacttcaaactatattataagaccacagtcaccaaaacagcatggtactggtataaaaacaggcatatagaccaatggaacagaatagaaaacctagaaataaagccaaatacttacagtcaacatatctttgacaaaacaaacaaaaacataaagtggggaaaggaaaccctatttaacaaatggtgctgggataattggcaagccatatgtagaagaatgaaactggggccaggtgtggtggctcacccctgtaatcccattactttgggaggccaaggtgggcggatcacgaggtcaggagattgagaccatcctggctaacacagtgaaaccccgtctctactaaaaatacaaaaaaattatccaggcatggtggcaggtgcctgtaatcccagctacttgggaggctgaggcaggagaatggcgtgaacctgagaggcggaggttgcagtgaaccaatatcacaccactgcactccagcctgggcaacagagcgcgactccatctcaaaaaaaaaaaaaaaaaaaagaatgaaactggatccttatctctcaccttatacaaaaatcaactcaagatggatcaaagacttaaatctaagacctgaaaccataaaaattctaaaagataacattcgaaaaacccttgtagacattggcttaggcaaaaacttcatgaccaagaaccgaaaagcaaacacaacaaaaacaaagataaacagatgggacttaattgaactaaaaagcttctgcacagcaaaataatcagcaaagtaaacaacccacagaatgggagaaaatcttcacaatctatacatccaaaaaaggactaatactcagaatctacaaggaactcaaacaaatcagcaagaaaaaaacaatcccatcaaaaagtgggctaggacatgaatagacaattctcgaaagaagatatacaaatggccaacgaacgtatgaaaaaatactcaacatcactaattattagggaaacgcaaaccataaccaccatatgatacttcactcctgcaagaatagccataatcaaaaaataataaatgttggcatggatgtggtgaaaagggaacacttttatactgtcggtaggaatgtaaactagtacaaccactatggaaaacagtgtgaagattccttaaagaactaaaagtatatctgccatttgatccagcaatcccactcctgggtatttatccagaggaaaagaagtcattacaggaaaaagatacttgcacatgcatgtttatagcagcacaattcgcaattgcaaaaatatggaaccagcctatatataaaaaggaacaaaataaaggcataaaaacagagtgaattttactgtatacaaatagaattcaaccaggatgtgaattctgggaggtggaatctaaaatagaatgtagaatatgacacattaatttaactgtactacagaagaggtttatggtagattctttggcattttctacttaattatgttgtctgcaaatagaaacagttatattccttccttttcaatctttatgtcttttatgtacttttcccttattgcactggctaggaattccagtacaatagtgactattataatagtagtaagagaggacatccttgcattgttcccagtcttagagataaagcattcagtatctcaccattaactgtaatgtagctctaggttttttgaagatgccctttagtaaaggttgttcccttcaattcctagtttgctgaggagttgctttgttttttgttgttaacatgaatgaatgtttgtcaagtgcttttctgcatctactaacagtcatatgtttattctcttattacagtcaactgtagtaattgattttcaaaggatgaactggaaattcatctcatattcccaagatgaaccctattgtgatatacttttttcatattgctagattcaattcacccatattctgttgaggatttttgtttctaactccatgaggaatactagtctgtagttttcttgtaatatctttggctttggtatctgggcaaagctggcctcataaaatcagatgaaaagtcttcctcctcttctatattctggaaaagtttgtatagaatcattagaatttcttccgtagatgtttagtacttcacctgggaaattatctgggtgtggagtttccattttggaaggtttttaatcacaaattcaatttcattaatagatatacaactattcaggttatttcttattgtctgaattttggtagtttatgtctttcaaaaaatttactcattcatccaagttgtcaaattcgcaggtatggagttgtttgcagtattcttttattatccttttcaaatctgtgggggtgagtgtgacaccctatctttcattcctgatattatcagcaatttgtttctttttttcaacttttattgatcttttcaaagaacaagcctttagttcactgatttttctccattatttttggtttcaaattgtcctgaattatgctgtaatctttttttttttttttttttttttttgagacggagtctggccctgtcgcccaggctggagtgcagtgttgtggtctcagctcaccgcaagctccgcctcccgggttcacgcctttctcctgcctcagcctcgcgagtagctgggactaaacgcgcccgcaaccacgcccggctgattttttgtatttttagtagagacggggtttcaccgtgttagccaggatggtctcgatctcctgacctcgtgatccacccacctcagcctcccaaagagccaccgcatccggcctatgctgtaatctttaatatccgtttccttttgtttgctttgagtttagtttgcttgtttcccctctagtttgttaaggcagaagtgtagtaatgatttttctaattatttatatcatgtaatgcaacaaacttccctgtatgcactaatttagctgcttcccacatattttggtgtgctgtatttccattttctttcgaattattttttaatttcctataatgtttcttgactcatggactatttagaagtgtgtttcattttgaaatatttggagattttccagatacctttctgttctttacttctagttttattctgctatgttctgagaacagactttgaatgacttttatgtctttaaaattcttgacatttctattatggccccaaatatgatctatgtaggtgaatgcccatgcgcacttgaggaagacatgtattctgctgttgtttagaatgttctataaatgtcactcacatttgaacaccgaaaaaattgacattcaatacatgaatgttggttgataatgccgttttggagtcttctgtaacctttctgatatcctttcacgctctatcgattcctgaaagagaagttttaagtccccaactataattgtgcgtgtgtctatttctcctttcagttctatcagtttttgcctcgtatatcttgaagctctgttagctgcatacacatttatgattgttgtctcttcttactaaccccttgagcattatgtttcttcatccctgattaaatcccttgttctaaactttgtctaatattaaagttgcttcctcttttttttttttggttagtattttgtggctttttttaatatcatttgcttttaatatacttatttatctttatatttaaaatgggtatcttaggctactccatcttgtagtctggtagttaaaatgggtttcttgtaaaacagcatttagatgaatcttgctcttttattcaatgtgataagctctatctgtaactggtgcattcagaatgatattaaaattgattactgatacagctggattaagatgtaccatcttcttagctgttttctatttgctcctttgttctttttcgctctccttcccccacttttctcctttggtttcgtttaattgcacactttttattattctgttttatctcccacttagtcattgtggatgacattttaatgtactgttggacatggttttctagtattttgttggggatttttgcatctgtgctcaccaggaatactgccctgcagttttcttgtgtctctgtcttgctttggtatcaggttaatgctggcctcatgagtctggaactggtccctcctcctcaatattctgaaagattttgagaaggatttccattaattcatctttaaatgtttggtagaattcaccagtggagctgtatggtccagagctcttccattaggaggtttttgattcctgattcagtttccacactagttataggtctgttcagacattttataatatttcttcatgatctaatcttggtagttcgtatgtttctaggaatttaattttttattctaggttatccagtttgttgatgtataattgttcacagttttttcttaagatcctttttacttctgtggcatcagttgtattgtctcttctttcaattctgatgttatttatttgagtcttctctatttttttcatagtttagctaacggtttgtcagtttatcttttccaaataccaactgttagtttctgtcacttttctatttaatttatttatgctctcgtttcctttatttcctttcttctgctaactttgggcttagtttgctcttctgattctagttccttgagatgtaaagttagttgtttatttgagatctttcttcttttatcaggtaagagcttatccatatgaatttacctctcagttctgcttttgctgcaacttataagttttggtatgttgtgtttttgtttgcctcaaggtattttctaatttcattttttatttctcgtttgacccaatggttattcaagattatgttcatttcaatatacttctggatttcttggttttccttgttatattgatttctagtttcattctactgtggtcagaaaatatatttggtatgatttagatattttaaaattttttaacatttgttttgtgatctaatatatgatgcattatggagaaatgtccatgtgtactggagaagaatatgtattctacagctgttgggtataaagttgtgtagatggccaggcacggtggctcatgcctgtaatcccagcactttgggaggctgaggcaggcagatcacctgaggtcaggagttcgagaccagcctggataacatgttgaaaccctgtctctgctaaaaatacaaaaattagctgggcatggtggtggacacctgtaatctcagctactcgggaggctgaggcaggagaatcacttgaacccgggaggcggaggttgcagtgagccgagatcgtgccactgcactccagcctgggtgacagagcaagaccccatctgaaaaaaaaaaaaaaaaaaaagttctgtatatgtctctcagatccattaggtctacagtgttattcaagtcaaatgtttccttattgatttgtcaggaagttctgtccattattaatggacagaaagtggggtattaaagtctcctattatattgtattgctgtatatttctcccttcaattttgccagtgtttcttttacatattagatgtcctggtgttgggtgcatatatatttataatcattctatcttcccagtgggttgacctattatcattataaaatgtccttccttgtctcttgtgacagttttttacttaaatcctattttatctgacatatgtatagctaccccgctgtcttttggttaccatttgcatggatcatctttttccatcccgcaccttcagcctatgtgtgccgttaagatctgaagtgagctttttgtagacagcatatagttgggtcttgtttatatatccattcagccactctgtttcttgattggggagtttaatgtgcgtttcctgtaattattgctagggaagaatttactattgctattttgttagttgctttatgttagtcttcttccttcatctcttctctcttgcagtctccctttgtgttttgttagttttttgtattgatatgctttgacttctttctcttttgtgtagcctctatgggtaatttctggcatatgtagttagtttggggcttacataaaatatagatgtaacagtctattttgagctggtaacaaacttaagtttaatcacatacaaaaactcttcattttaaattctcctgcccacatttggttataactgtcacaattcacatctattcacagtgtatcttttaacatatttcatatctatttttaatacttttgtcttttaactttcatagtagaattaaaagttatttacccaccaccattatggtaatgcagtattctgtatttacatatatatttacctctatcaatgagtttcatacttttctatactgtctttttgctgtttggtgttttttcatttctatttgaaaactccctttagcattttttataaggcaggtctagtggtgatgctttggtttgggaaagtctttctctcatcatcatttttaaaggatagttttgccaagtatagtattccgggttggcagagatttttttgttattgttgtttgttttgtctgtttgatctttcagctctttgaatatatcattctactctgttctcgcctgcaaagtttctgctgaaaaaaatcccttaatagtcctatagatgttcccttgtatgtgacaagttgcttttctcttgctgctttcaaaattctgtgtttgacttttgacaatttgctataatgcatcttggtatgggtttgtttcattttattttgtgtcctttgtgcttcctgaatctggatgttcgtttccttccccagctttggggagttttcagccattacttttaaaataagctttctggtcctttttctctattttctcctgagattcccataatgcatatattagtctgcttgatggtattctataacccacttaagccttcttcactctttttcattattttttattatcactcccctgactgaattatttctaatggcttgtcttccagtttgctaatcctttcttctgctttatttagtctgatgttgaatccttctagtgaatttttcagccaattctctggagagcccacaaagaaaagatggcgtactggttgcacaaaccaaccccttctctcccctggatgagttagggcatctcttcctgactgtctggtactgtaccaggggcagtatctccagcaacagggtatcctgaatctccctactagcttcactagtcttgtttcatgttctctcaggatgcaacagcctttacaattagtttctgatttctcacaaacagaatttgtctgtgaattgttgctgaattagtattttgggaaggtgaggaagggtccaagtcttcctacaccaccatcttgctgatgtcaccccccactccttcattttgaaggggtatttttgcttggtgtgaaatcctggattgacagtttttctgcactttaaaaatgattctcccttgtcttcttgcttgcatggtctctgataatagatctgctatatgtaattcttattcttgttcctcaatagacaatttttttcttgttatcttcaagattttccttttatttttagtttccagcagtttaaatataatatgtgtagatgtgttttaaaattttgttttggtatttatctctgagcttcttggacctatggtttcgtgtcactaacttggaaaattctcagccatcatttatttaaatacttttcttccatctctgctccaattacccatcaggtccatttcatataagtcatagttatcttaaattcctgttgggttgttgcaatacctatgtcataactaagtcagttatgattattgctttgtctctttgaagtatgttttttctttttcttcttgcctttttatatgcctcataatcttcattgaaggctgtacatcttggatagtacagtagatatgaaggttaagaagtttttacacttaaacatgagtatgtcttttcttctgctaggtttttaacatggggggttatgctggtctattcaatagctggacagggtttgaggtttgtcattgctgtggttacactgagtgtaccccaggcttcaataatatcctctaataatatctgtgtttaaggtaagggttgatttcccatggttgttttctcaatgcatgtttctcccttagttttgggtgttccatttgtgctgctccccagagagaatctctcttgcaggcttcctagctgtactctactattgcttctatttgattcttgttatcttggtgggggttgagtagacggagggatagcattctcttatgatctcactaagcctcagtcttaggcagacaccatatccctaagtcttggggatgtggccttcacaagtgctcttgccgctctgccagctgtagtgctagtcctagagcatattcctcccctactcccagagatattactttttttcaggtccctttcctaaactgcaatagctttctacaagtctcctaaggcaactgtttttgctgctcttcattatgcagtgatagggaagatgggtttgggctgctgttgccctcccccagctaacaccacaaggaaaggcttctcaggattcactcccatcttccctatgagtgcctgttgggattcccagaggaaaagcctacaagagactgcaacccccacctccctaattttgcaagtcccccagtggtttcacactttcattagctgacattcacactttaaaaatttgtttaaaaacttgatagctgtattttcttactggcttatatggtgtctggcagagtccatcccaggtaagtaaagcttgagtcctgtttctctcagctggcatctttctttccccagatttaagattacttggttgccctgtgacctcagttctctgaagggtcctagaaaaattattttgtagtttgtccatttccttgttgtacggtagaagtttgtagtttccttgttgtaatgattgaagcaaagttctttccagctgtttacatccctaaggagaaacccaaagtcccctcattacaataaacttttgagaagtccttcagtttattttgtcatggggctcaaaaataccttgcaaataaagttaggattaggataacagtttaaagtcaagtaaattagctaggatggagtgggagtgggaaagcattacaagcaaagcagtagcaattggtaaggcctcagaaaagacggaattcagtatactggaggaactcaactttaagctaattgaggaaatactttagaaataaattcacaaactaaatgttatattcataacaaatgttatttttctttccactgcaaagaacttacttccagccatatcaatttgtttagtttctggactatcatgcatgattccctcctgaaatgagctctgatacagttaaaatgcttacagcaactgccatatctacataataatatatattttttaacactccacttgcttgaatccacgttttgccaaaaacctaaaactcattgaaagctctacacctggcagcatctctcaaggcagaaattctctagttagcgtgaactaactcacagactggggatatggctctgtggtggacaacagtattttctcccccacccccaactctttcctagtcttctctccactatttccatgtgtccccggattccaggtcctaccacaccactttgcaacacatgtttaaatcacaagggaaaagggccaatgacacatgaaagaaggatataagggctggacccacttatataagggcacccactgatggctggaagaacagcattaaactctgtgggtaccgctctatctgggatctaaagttgccaaagccagttgcaactacaggaatcaaaaatttaatttctcaaaagcttctttactttgttttctctttaatttggttggcatgtttgaaaacatttttattctactctcatactcaaataataatttggctaactgtaggcttctcagaaaaacagtttttccttagaaatttaaagcaatgtgacttcactttgtggctccagtgacttctagtgttgctgtacattgacattctacttctagatcattccaactttttttttcctctgtagaaagtttttggcctttcttctctcttattggtttccgatagttggtgtgggtttttctcattaatcgcactgagcttttggtcagtatatatcacggacatacggtcatttcaatccgtatatttattgttctcttctaggaaattttcttgcacgtttttgttttcattttctctactttctcttacgtataattcctaagaataggatgatctatcccttaaactgatcatctaagtgtcttatattttatctcttaacatttctacttctctcttagggcccgtatgtttgagaaggaagctcccacttatgttagttaaacattaagtcacagagctctccattaagaaaactttttctttagacagggagttgaagcttcataaaacagtttaactgcctcctactttccttccctctagttcactctaaacatacttgtatgtatacattctagaaattttcttccaaaatttattacttttaaaaactcgaggccaggcacagtggctcacacctgtaatcccagcactttgggaggctgaggtgggcggatcacaaggtcaggagttcgagattggcctcgccaacatagtgaaacctcacctctcctaaaaatacaaaaaattagctgggcatggtggcaggcgcctgtaatcctagctactcaggaggctgaggcaggagaatcgcttgaacccaggaggcggaggttgcagtgagtctagatcgcgccattgcactccagcctgggcaacagagggagacaccgtctcaaaaaaaaaaaaacaaaaaacaaaaaacacaaaactcaaactacaaaaatgttggaagatcagtacaaagaatacttctaaaacccttaatctatattcagcattgccacatttttctacctctctttccttctctaaaaacatatacacaaacttcacgttaactctttcagaatgtacctccaaaaactaagaagcctcctacataaacacaatgccattatcacaccaaagatattaaacattcgtacaataaaatatattatctctatacttccctagttgtcgcaacaatatcctttaaaaccaattttaaaataaattgaggatttaatcgagaattctatacttataaaatgcatcttaagtaacactcccctgtttaaacttctttttttccccttgcccaaaatttactggcttatggtaacagagaaactgaggtatgtggaaatatgaaagaaaaagagagtgatggaatgtggaattggtatataatgtttaagaataaacaaaataaccatggaatactatgcaaccataaaaaggataagttcatgtcctttgtagggacatggatgaagctggaaaccatcattctgagcaaactatcgcaaggacagaaaaccaaacaccacatgttctcactcatggatgggaactgaacaatgagaacacttggacacaggatggggaacatcacacactggggcctgtcatggggttgggggaggggggagggatagcattaggagatatacctaatgtgaatgacgagttaatgggtgcagcacacgaacatgggacatgtatacatatgtaacaaacctgcatgttgtgcacatgtaccctagaacttaaagtattaaaaaaaagaataaacaaaataaaactggaaaatcttagatatttttatattctttttttttggagacagagtctcgctctgttgcccaagctggaggagcgcatggctcgctgcaggcttcatctccgagattcaagtgattctcccatctcagcctcccaagtagctgggaccacaggcatgcacaaccatgcctggttaattttgatatttttggtaaagatggggttttgccatgttgcccaggctggtcttgaacacttgggctcaagtgatctgcccaccttggcctcccaaagtgctaggattataggcctgagccaccatgcccagcctgatatttttatattctttatggagtcctttttaaaaagtgtattttattttagattcaaggggtacatgtgcttgtttgttacatgagtattaccttaaattacttcaatgacaacttttataattttgtttctgaatacctcattagcttcatctttcactccttgaaagtaaactccagccatacataattacatacctttcttaaaatatacaaagcattgctccttaacagttactgtatattacgtttccatgcctaaaaactatctcttgattgctgatcatcagttccttcttgcctttgaccaataccttcttgttcttaaagagatcagattaagaacaactttatcatttgattgggatatccgtctatgtagatctatttgtacttctgtatctcatgagcttaaccatcttgtggcatttatcactctgccagtgcacccactgatttatctaagtaggactgtgaaccacttatggcagggactggtcatatggtttgatgtttcatggcccagcacaacctatataagaaaagatgtgcagtaattttgtgcaatgaatttaaaataactatgattaatattttgagtgctctatgagaaagttagaaaaagagatgggtactgtaagcagggaaatgcgaactataagaaagaatcaaaagaaatgctagaaatcaaaaacatattaataaaaacaaagaatgccttcaatggactcatcaacaaactcaacacagtagaggaaacaatcagtgaacctgaaaatagaaacttcaaaagaaacttcccaaactaaaatgcacagaggaaaaagaatgaaaaacaaaagagaacatccaaaccatgggagaacatccaaaccatgggacaatatcaaaacatgtatctattaaacagacatctattttcccaattagaaaaccaaaaggagaaaaaagagaacacagatgaaatattgtaagtaataatgtccatgaatgtttcaaattagtgacacacaccaaaccataggctgaggaagcgcaaagaacactaagcaagataaataccaaaaaaaaccacacgtgtatatcatattgaaactgaaaaaacaacaacaaaaaaaaacaaagaaaagatagtcaaggaacccagagaaaagtaacaccttacctataaaacaacactgataaaaattacagcagacttcttgtcagaaactatataaacaagaagaaagtggtgtgaaatatctaaagcattaaatgaaaaagagccaccaacctagaattctctctatccagggaaattatccttcaaagttgaaggagaaatgaagactttcatttctaacaaaaactaagggaattcatcaccagcagacctaccctgtaagaaatgttaaaaagttatttaggcagaagaaaaacaatataggtcagaaacatggatttacataaagaaaggaagagcaccagagacaaaatcatgaaggtaagataaaatcttttggttcttttattagtaattgatctaaaagataaatgtttgttaaaggctataatgataacaatgtattaggtgattacagcacacggataagtgaaatgaatgacagggacatcacaagtgacataacaacggagaagaagggggaactgggaatactgttgtaaagttcctgcactacatatgaagcagtatagcattttcaaaagtgaatttagattacttaaaaatacacattgaaaactctagggtgacactaaaattttttaaaagaagtataaatgataaagtaaacaggagataaaatgaaataatataaaatgctcaatgaaaaccgtagtaatcagacaaaggaggggagaagagaagaaacaaaacaaagaaataaaaaaattttctatttgcatacgaagcaaatggaaaacagctaggaagatggtagtgagctaggaagatggtagtgtttttttgtttgtttgtttgtttttgagacagagtttcactggagactccagcccaggctggagtgcagtggaacgatcttggctgactgcaatctctgtctcctgggttcaagcaattctcctgcctcagcctcaactgggattacaggcatgcaccactatgcctggctaatttttgtatttttagtagagacagggtttcaccatgttggccaggttggtcctaaactcctgacctcaggtgattcgcctgccttggcctcccaaagtgctgggattacacgcatgagccaccacgcctggccaatggtagatgttaatccaactacaaaaataatcacaccaagtgtaaatggtccaaacacagcaattagaagacagattgtcagagtgcatttaaaaaaaaaaaaacaactatatatgtctataagaaacccactttaacattcaagttacaagtaaagagatgaagctaggcgtggtagcgtgcacctgtagtccaagctatttgcaggggctgaggcagaagtttgcttgaacataggagttcaaagctgcagtgtgccatgactgcatctgtgaatagtcactgcactctagcctgggcaatacagtgataccctgtctcaaaaaaaaaaaaaagtcaagggatgagactggtggcctatccttccctagaaatgaaaaaaacaaacaaaaggcaaaacctgtctgaaccagattttcagaaattctgggagatagtcaaaggttgcacccaagcaaacacttaacaaaaaaatttgagcttcaaaaagaaaataagtgcagtgatttaaaacacatcaaatatgctaaaaatgatgaatatataatggtgataataataaaaacaacccactaggagatgccagggaaccactccaataactcaaaatcatataaagggaaataatccatttattctgccttttctgtacaaactgtacctaagggtgaacaaagagttgacgaggaaaattttttctttaggaaaatattctagctagtaaacgaagtaatgacagaattagaatatcgccattttgtagcccttactgaaataatgggtctagttagtaatcatccatgttttctaaaaccggtatagtggtaagaagaactgttctatttttaaaacatatgaaaaatatcctctttttttttttttttttgacagagtctcactctgtcaggctggagtacaatggcgtgatcttggctcactgcaacttccgcctcctgggttcaagcgattctcctgcctcaggctccagagtagctgggactacaggtgtgcgccatcatgcccagcgaatttttgtatttttagtagagacagggtttcaccatgttggtcaggatggtcttgatctcttgatctcgcaatgtgcccactatggcctcccaaagtgctgggattacaggcatgagccaccatgcccagcccatccttctatgtctcaccttacttcctctaatattacaacccaatagtccttcagccctgtcaggagcttccattccttgattctactaattttttactgtccttcactctcttcctatcctcacttttccacttacctagcctaaaatccacagtcaaaacaacaatcaattattttgccaacttaagactcttcttgcctctctctcacattattcctctttgcttcatgaaaccaacattctggttaaatccaaatctccccctagcctgtctggctgcaactatgcggatgaacactgcaggagaaaaatcacacagctacacagaataggctcactttaaattcataaatactaacattaagtgggtctttgatggtgcctgaaaatcataatttctctattctctgtcccaatctctgtgattttttttcccctgttcttctcaaactctagcacgtcctccaccaatctcactctcatttgagtctcttgctaggtacttcactataaagttaaaacaatcataagagaaggtttacaagttctcaccaacacatctgcccatctacttgtatctgtgcctgggtacttctccctctctcctgttattgccgtggtcaagctccaagctcagccaaactctgccactagatctcatttgctctggctacttaaggacatttttatattatctgctttctctcctgtattgtagtttctctctctaccggatcatttcaatcagtatataaacagaatgtgtacctcttaactccagctaccattccatttcacttcttccatttagaaaaaaaaaaaaaaagtcttcaagagttgtctagacttgatatctccaacgttttcttttccagttctctctttggcctaaaattccacggacactgctttcagggtccctaataaatgaatttcatgttgccaaattccatgcttctttctcactcctcattttatgtggcacccgacacagttcttgttaaaacacattcttcccttggtttccagaatatcacactcacctagttttccttcaacgtttcaagctagtccccatcagtctcttttgctaattcctccttacttcccagagtttgttatgttggagtgactcagagatcagtcatttgcctctacctttctctatctatcctaccctctaagtgacctcattcagtctcgtgttaaataccatttatatgctgataattcccaaatatatgtctccatcctagatcttagatctcccttttgtctctctttttgaatttcatacttgtatatccaactgccaacttgatatctccacttgaatgtctaatgggcattctcacatttcacatactatattccaaactgaaatctcactacattccaagtcagtttttcctacattgttccccttctcagttaatgacacacccattcaagttactcataaaaacagtattgtgtcaccttgtctcattcacactctacctcagtttgtcagcaaatcacagcagctctacctttaaattatatctagtacatgactacttcttagcatttttactactctggtccagatcaccaatatcttttccctaaagtactacaatacagtcatgtgctgcgtaacaatgtttcagccaacaacagatcacatatacaacagtggtcctataagactttaatgaagctaaaaaattcctatcacctagtgacatcatagccatcataacatcgtaacacaatgcattacacacgtaacctaggtttatataagtacactctatgatgtttgtggtgatgctagtgtcaacacccctactgcactgatagtggtataaaagtatagcacatacagttgtgtatggtattagtatttgataatattattgattattgatcatgtgaatagtacataatacttgacaataataataaatgactgttactgctttatgtatttactatactatactttttattgttagagtatatccctacctaagaaaaagtaaactataaattagcctcaagcaggtccttccagacgtattccagaagacattattatcacaggagatgataaccatgcatgtttattgttccatgcatgtttattgcccctgaagaccttccagtggaacaagatgtgaaggtggaagacagtgatattgatgattctgaccctgtgtaagcctaggctaatatgtttgtgtcttagttttcagcaaaggagtttcaaaagttaaaatatttttaatagaaaaaagcttataaagatataaagaaaatctttttatacagctgtacaatatgtgttttaagttaagtattattataaaagagtaaaaaagtttaaaaaatttaaaagttcatgaagtaaaagagttacagtaagctgaggttaatttattactgaaaaaagaaaaatgtttttataaatttagtgtagcctaagtgtacggtgtttatagtcaacagtagagtacactaacgtcctaacccttcatattcactcaccaccacacacacacacaaaatatatatataggtataccaattttaatcgtatttatttatttatttttgagacggagtctcactctgttgcccaggatggagtacagtggcgcaatctcagctcaatgcaagctccgcctcccgggttcaagcaattctcctgcctcagcctcccaagtagctgggactacaggcgtgtgctaccacgcctggctaattttttgtatttttagtagagatggggtttcaccgtgttagccaggatggtctcgatctcctgacctcgtgatccgcccaccttggcctcccaaactgctgggattccaccgcgcctggcccatttttaatctttatatactgcattttcactgtatcttttctgtgtttagatatgtttagatacacaaagtcttactactgtgttacagttgcctatggtagtcagtacagtaacatgctgtacaggtttgtagcctgggaacaataggctgtgccatatagcctaggtttgcaggaggctataccatctaggttgtgtaagtatactccatgatgttcatacaaggacaaaattgtctaaccatgcatttttcagaatgtatccccatcattaagcaacacaattgtagcttcctaattggtctctgtgcttcttcccttgacctccctgctctttcctcattcgtcctcccataggccattctcatcagagcagccaaagctgtcttcttaaattgtaagcagatagtatcacttccatgctcaaaaaccctccagcagcttcccatctcactcagaggaaaagccaaaattaatactacgggccataaagcccaatttgatctgccctcctcccatccacttacctttcttctcttctctcccactactctccccttcaattattctattttagcctcttcattaacaggcatgttgccacttcagagcctttacaactgctgttccctctgcctggaataacttttctcactcacgcataaatagctcctttacttccttcatatctttattactaccttttcaggatgccttccctggcgagcccatctaaaactcagactcctatctctagttctaaatatcctctcacttcacattttttcttagtattcttcaccatttaaaatacttcatacttaatttacttaccttgtttattatccagcccacaaaaatgtaagtaccatgatagtagggggtttgtctcttgttcactgctatatcccaagcacctaggattgtgcctgttacacagacagccttcaataaatgagtctatgaatgaatgaatccttaatatatgaagaactctggaaaagaaatttgaaaacagaacactactttagaaaacatataatttacaaaagatttttttaaatgcttgacttcaataagtaatgaaacaattgttttagagcaaattaatttatatccatgaggttaacaaagattactactatttagaatatccattgttatcaacagtgtatgaggatataagcagtcttatactatgccaataatactgcagattattggaactttacagaataattggataggttctgggaacctttaataaaagcatacattttaacctatcaattctacttttaggagtctgctccccctccaaaaaaatttagaaaagtatatttaaacacgtgccaaatagttgctgataaacacagtttataatttcaagaagctacagagaactaaatcacccatcaacaggggtaaacgtataccatgaaatactttaaaatgaatgcataatttgtgattgtttaaatggaaagatactaatcatacattgttaaacaagaaaggttggttacagagctgtatgtatagtgttactgcaattttgaagccattatgcacacatatagaacatatgaatgtatacgtatgtatacacaaaggcgggggtgaaaagatggaaagtaaattttgacagtagttgcatggcctgtagaactatgaatgatttttgttcttcgagcttttctgtatttttctccaccccactccactccccaaatggggtggagtagggaaggaggagaatgagtttagtaagtacacaaaacaacgtagctaatacacgaaaataaaattaaaaataaataaatattaaagtgttggggatatcgatgtttcatataaaaacatatttccggccgggcgcggtggcttacgactgtaatctcagcactttgggagaacgaggcgggtggatcacctgcggtcagttgttcgagaccagcctgacccacatggagaaaccccgtctctactaaaaatacaaaattagccaggcgtggtggtgcgcctgtaatcccagctactcgggaggctgagggaggagaattgcttcttcccaggaggcggaggttgcggtgagccaagatcgcgccattgccctccagcagcctgggcaacgagagcgaaactccatctcaaaaacaaaaacaaaaaaacaacgtatttccaatgaccaaagctaaagacatgcagcgctggcacaaacgccaagtctcacacatctacacccacaagcacaccctaccttgtatccacagtttttcattcattcaagatcccactgtcatgcacgtttgcacgcaggttcatactgaaagataaaagggaaagcgcctccacgaaatccgcttacggacacgatcccggggccacactcagccagacgaatgtctggcaaatgacagtcacttcacgccagactctcacagtccttcacacgccactcccactgcctcagggaaccacaagcacaggcatcgccccgcccggcgtcctcctccaaagattggggcaccaggaccgcgggcccccactcccacccagcacaaagagtccggcgctcagagctagcggtttcccgaggactcaccaccaagcccgcggacacaggccccgattccacacttaacgctgccaaagtggcagagccggcgcgggctgggacagaggcggcactgaggccggcgctgtcggtggctgagagcgccacaagtctcggtccgttacaccaggggcgacgcttcccagaggcccccgcggctcacccgggcgggactggcttcactgtttgcgcgtcctgagaagcagaccacggtgttccagggctcacagctccgcgcaggggagctcagcctaggttttgcacgagcggcctcccgcgagcccagctctgagagattgggagcgcaacttggtgctgagaagaatcgaatcgttccgctgcttcctgcgccgaactacatttcccagaggccttcgcggccctacttccccgaccccacctgcaaaaaggcacttccttcttacagtcggctggagctgcaggttcgcaaggtccgtgaaggaagcccggctcagtgtgtttagttccgtctttttgggtctctacctgaggctagaatacagcggggtgaaggtggtgagagctccagggccagtgaaggccgggtcagctggagccttaaggtcctgacagcggctagaagagggaggagtgacgtagtgtgactgtatgtgtgaaacttcggccatggaatttggagtggggtttccagggcgagagaccctgtccagtgacatctgaggtcgtgcgaatatgcgaccttttgtgtgaccatggtcgcgttttatattctcgtggctgtttgattctgaccttgcagttttgtcagagacaatgtgcatgtatttgttctttctggacttctcgattgtgagtgtgacagtgttattggatttcatgacccgggatcgtgagcgaaaagtagtgtggccagaccgcctgacttctaaacagacttggccttactagctgtgtcatctcagactaggtacttaacttctctatgcctttcgtgtttttttttttttgtttgttttgttttttttgaggcagagcctcactttgttgcccaggctggagagtgcagcggcgcgatgttggctcactgcagcctcgaactcccgggctcaagcgattctctgcctcggccttccgagtaactgggaccacaatcaagggacactccgcccggctgatttttgtttgtttgttagtagagataaggtctcgctatgttgcccaggctgctctcgaactcctgagctcaagcgatcctcccgcctgggcctcaaaaagtgctaggattacaggcatgagccgcacggggccggtcttaatacctttaataaagagataataggccggacgcggtggctcacgcctgtgatcccagcactttgggtgggcaaagcgcacggatcatttgaggtcacgaggtttttgtttgtttgttttttaagacggagtcttgctctgtcgctcaggctggagtgcagtggcgcgatctcggctcactgcaacctccgcctcctttcgcctcccaggttcaggcaatttttctgcctcagcctcctgagtagctgggacttaaggcgcgtgccaccacgcccggctaatttttttgtatttttagtagagacggggtttcaccatgttggtcaggctggtctcgaactcctgacctcgtgatctgcccaccttggccttccaaagtgctgggattacaggcgtgagccaccgtgccaggctgagggtagcgggtgggagactgccaggagtgtagtgcgcttgcgcagtttaccaccctgcatcccccccaccccgctcccctcccaatttttttcgggtatccagcacaattctaggaattcgcctcccacccattttgagtagacgcgccactagcgcgttcccacgcacaaaccttttccctgcggccaacctgcgattctcaactccccgccctggttgctaagggaggcgcgcagagcgcttgtgcctgcgcacttccacaccagcccgtgtagtgtgacgctgggccccgtccctgtgaccgggccaggctcggagctgcagggaatccggactttcgggctctctggaaggccggggagaggccagtgtgggaggacctggtggggaggaggccgtgttacaaaccctgcgcggagctgcaccgctgctgccagacactgcgacgccgcgaccttttctactccggactacgtttcccagcggaccccgcgggagttgggccggcggcccctttgtgtcctccgggggcggaggcagctgaggcgcttctttccgggcccgtaagggctgggttccatccaactaagggtagcggtgagacccgagtgcagattccccgagccttcggggcaggaaggagatcttccaccagttctgttctgcaggtcgggagtgggctgaggagtggcgtgtgggtctccggaagctcgtcgcaggccatctgtgtgactccggtgcgagtggaggttggtaccgttcagtgcgaggctgtcaccccgtgtgcctgtccacgtcctgtgtgactgggtgcgaggaagtcaatggcaccgtggaatgtgaggctgtgagttgaggcgggagcgggcgactgttcgctgcaccttgttgggccgatacccgcggcttctttgtgactgggttgtgagattgtcgcttgtgatagataccctggtggctgagccttgccggtatgggaaagggtgcccgtgtgaggcagtccatacccatggcctctgactgtggcgtgggtaagacggtggttggcactgtagtttttcagactctgattatgtgggggattgagtgagagactgtgtgccacggagaggcttttaaagccagcccaagtcatatcaatgtgccaccaagtttcagaatcactgatttattggagaggaggattgtggggtcaggtcctcttttatttgatcttggtgctcttatttgttagttctgtgtctttatgtgaaaacttacattcctctgagtctgtatttgtaaagcctagaacatctgttgttaacctaaggaattgggaaatgatttaggcatcagttaaattgtatgcaaacaaattcctaggtctccattatgctctctctattggagggaaggttgcaagaggaggaaagagaatcctaaaaagtctagactggtgattctggatgctgcaagaaaagtctagtttctcatgttcttttccccatctcagtcatctgaggccactgctatttcccaagagaagagccaggaggaagaaagaatggctgttgggcttcttaaagccatgtaccaggtgtgttggtgttttctcgatttcctgaatacctgtctgcttttcaaaacaagcaggtactaattttccttctgctgaaacgtttctgggtaaccagtcatgtcccttatcaacactctccattggattcccatcttattcaagataaacgcgtaagtccttgtcttgacctgcagggccctgcataatctggtccctgactgtccctctgacttcatctaatttttctcatcctgtctttaactcagtcactcagttccagcaacactagcttccttgtaatgtggtgagtacattcttatttattcttttttttttttttttttttttttgagacagagtctcactctgttgccaggctggagtgcagtggcgcaatatggctcacggcaacatccacctcctgggttcaaacgattctcctgcctcagcctcccgagtagctgggacgataggtgtgcgccatcacgcccagctaatttttgtatttttagtagagacggggtttcaccatgttggccaggatggtctgaaactccagacctcaggtgatccacctgcctcggcctcccaaagtgctgggattacaggcgtgagctaccatgcctggccagtgagtacattttttttttttttttttttgttgagacggagtcttgctctgtctccaggctggagtacagtggcacgatctaggctcactgcaagctctgcctcccaggttcacaccattctcctgcctcagcctcccaagtagctgggactacaggcgcccaccaccacgcctggctaattttttgtatttttagtagagacgggatttcaccatgttagccaggatggtctcgatctcctgacctcgtgatccgcccgccttggcctcccaaagtgctgggattacaggcgtgagccaccgcacccggccactgcacccatgcattcttaatgcatggccttgcacttgctattctctctgcctgggatactgttccctcagatacccgatacagaccaacttcctcactctagtctctaaccaaaaacgttcattcattctaatttttagtaagcacccattaccactgggtgtcgcaggtcttagtccctcatcctgttctctacacttactaccctggtgatctcatcctgtctcatagcctcaaataccatgtatatgccaacaactaccaaattgtgtacagcccagacctctctcttgaactctagacttgtatacctgactgcctacatcttcatttggttgcataagagatatgtcaaatgcaaacatcttacaaatggagtgaaatgagccattggcggttttggaacatgagtgacatgaactgattttcattttggtagcatcactctggttgctactgagagtaaactgaatgggacaaggatagaattagggaactcaactaggaaactcttaacgtacttcctggctccattgcttaagctaaacatcttctatcaggaaattagagacttcaaaatacatccagaatcagactactattttttttttttttttttgagatggagtctcactctgtcacccaggctggagtgcagtggcacaatctcaactctctgcaacctatgcctctccctgcttcaagcgattctcttgactcagcctcctgagtacaggcacgtgccaccatgcccagctaatttttgtatttttagtagtgacagggtttcaccatgttggccaggatggtctctatctcttgaccttgtgatccgcctgcctcggcctaccaaaggctgggattacaggcatgagccatcgcactcggcccagagaactttttactatcaccactgcttccattatgttctgtaccatcatctctcacctgtgttactgtggtactctcctaacttctctctctacctctactcttgttctttttagtctgttctcaatggagcagccaaagtgatcttgttaatacataagttgtatgatgtcattatttataggcgggggtgggtggaagtaatagaaagcatagacaactctttcaaaaagtttagctataagagaaggagagacctgggcacggtgactcacgcctgtaatcccagcactttggagaccgaggtgggcggatcacctgaggtcgggagttcgagaccagtcagaccaacatgcagaaaccccgtctctactaaaaacacaaaaaattaaccgggcgtagttgcgcatgcctgtaatcccagctactcaggaggctgaggcaggagaatcgcttgaacctgggaggtggaggttgcggtgagctgagatggtgccatggcactccagcctgggcaacaagagtgaaactttgtctcaaaaaaaaaaaaaaaaaagaaggaaagaaatgggtggtaactgaaggagaaagtcataactgacaaagtttcagaaagatggatatatgttggcaggctgatgttaaagattcagtagaaagggaaatttgaagatgaatagagaaaaaggaattgctggaacaatgtgcttaagtaggtgagaggagctaagtgtttggccttttctaggaaagtgggttgttcagttataggaataagggcatgttagggtgtacaagcacaggtgcaggtggaagtgtagatgtggtgggagtttgtgggaattatctttcaatgggttttgttttctcagagaaaataagattatcagctgagagtgagcatggggaaggagatcttgaaggtgtgaggtgagaggggacagtatcaaatggtcatttagcagagtgaagggatgaatggactagggaaatgtatcatgcagcatttccgcccacttgaggttaagtgatcatgaatttaaagtgagactgcttagcatggttggtatgattttctctagcagagttcagctatgcaggatacaggcacagagtaagcagaaaaatggctgtggtttaaccaagtgagtacagttaagtgagagaggggcagagaagacaagggcatatgcagggggtgattataacaggtggttgtgctgggaagtgagggtactcggggatgaggaacagtgaaaaagtggcaaaaagtggtaagatcagtgaattgtacttctccagaatttgatttctggtggagtcaaataactatccagtttggggtatcatagggcaacagttgaggtataggaggtagaagtcagagtgggataattgaggttatgaagggtttggtactgactggtactgacaaggtctgggttatgaccatgggaatgaatgactgtagaagcgtagaggatgagactattccaggagagaggggtcagagaactaagaggcgaggttgtggggagtattatttatgtggatatcgaagtgaccaaagaatgataggaatggcattgaagagagtaacagtgagtcaggtgctgaagaatttaaggactgacagagaactggtgtctatcagaaattagtagatatatatcacaaggagggattgtgattgacatatcctaatttcatgaggtttaaaactagatgtcttttagggaggaggaaatggtttggaaataagagcaaagaggtgacctgcctcaccttcaggtgctgtggtacaaggaatgtggggaataaaacattcatcagtgatagggcatcaggggaagtcgttctctcagctggaagccatgtttctttaagggcagaaagaaaacaggaaaaagtgggaactgtagttttgcttcagactggtttaatgataattgtgaatggattttgaaaccaagtatttgttaggggtcaaatattttaagatcagaatttaagctcctatgttgacatagaaattatttttgttgactatcaagaatcagtggaaaatatgtatgtcatatataaatatttatacatttattatatgtatttatataagctaaggaaaacattttaggaagcattgttagcaggagcagagagggagagatttacctacttcctataattaagtaagaaaaaaggtgactgagcattgaacttgaagaattttgcttctgtagagatagtttcttttgttttgttttgtttttgagacaaagtcttgctgtgttgcccaggctggagtgcagtggcccaatctcagctcaccgcaacctctgcctcccggattcaagcgattctcctgcctcagcctcctgagtaccggggattataggtgcgcaccactatgcccagctaatttttgtatttttagtagagacagcgttttaccatgttggccaggctgttctggaactcctgacctcaagtgatccacctgcctcggcctcccaagtgctgggattacaggtgtgagccatctcacccagcctagagacagtttctttaactgtaacaaaattgtgtcaaatgcaaaaggttgcattgacaggttcacatcttttaattttgtaaaaaattaaattaatacatacacatataatgtatgtttgtttcatcagcaagtggtcacattatagaaacctggaatccagtggcatcacagcagcattaagttttttttgttttgttttgtttttgttttttttttttttgagatggagtctcgccctgccgcccaggctggaatgcagtggcacaatcttggctcactgcaacctccgcctcctgggttcaagcgattctcctgcctcagcctctggagtagctgggactacaggcatgtgccaccacacctggctaatttttgtatttttagtagagacagtgtttcaccatgttggccaggctggtctcaaactcctaaactcaggtgatccacctgccttggcctcccaaagtgctgggattacaggcgtgagcccagctcagtgtcaagtttttaagaactttctctaacccctgtaggcagaagcaatattatgagtagaacacccatttctttacacaaaattttgggaactctggattaaagtatttgaattttaatggaattgatgctctgctctgcttggtctagcacagttttcagagatacagtgaatactttctggtattgtttttgatccctttctagcttcttgaaattttcttcaaaccactcattgattaattcaactgagtcagaatttgaatacttcacatgtgccaggttctattctgtacctggggataaagcagtgaccaaagccaaaacatactctgccctcatggagcttaaattttagttgaggagggtgaagaacaggcaatgaataaaataattaagtgcagtggagaaaaataaaggagggttaggaaatagggaattggggtggaagcagtgctattttatactggaataatctgagatatacaaaggccctgagtacaaatatgataacatggttacatatttgaggatgtaatatcagagagagcccagtgtgcctagggcagaggaaatgaggtgaatatggtaagagataaggttcttccatttatttcatttcaggagttggtgaccttcagagatgtggctgtagacttctcccaagaggaatgggattgtctggattcttctcaaagacatctgtacagtaatgtgatgctagagaactacaggatcttggtatcactgggtaaggatatcttcttgcaaaactgagcttctgctcaaaaggggctctttgctaccactattgtgaatttttggataatatctgcaaaatttggctgaatgtctgctgcctatgccaaacaaatggcttagtgtttgtggatttggcagtgaacatattcttggcctgtgcctgaagcttcatcttccttatccttctaatacatgtcctttacacatttctctttttgcttactgtaaactcccttttccctgatgagctaaggattgaatgtgagttctggaatatccacagcatgacaaaactctacttttttttttcgtatttgcaggactttgcttttccaaaccaagtgtgatattattgttggaacaaggaaaagcaccctggatggtgaagagagagctgacaaaaggcttgtgctcaggttagtgaagaggaaattggcaaaaatctttgcacgtgacagctcagcttgactcaaaggtatcacctcttcactcttcaggcttccaaattcttctcaaatgttctaggttttcataaaaatttggggccatttaggatgttctcccacatttgttatttttaattatttcccttctcttactttcctatctcctttctaacaagtcccatcccctctcagtttcataagcctctcagtctttaaaaaatcttgtagtagtcttataaacttttttttttttttttttttttgtgacagagtctcgctctgtcacccaggctggagtgcagtggtgcagtctcggctcactgcaagctccgcctcccgggttcaagcaattctcctgattcagccttcccaggagctggaattacaggcacatgccaccacgcccagctaatttttgtatttttagtagagacagggtttctccatgttaggctggtctcaaactcctgacctcacgtgatctgcctgcctcagccttccaaagtgctggcattacaggcatgaaccactgtgcctggcctcttataaatttttgagctctacagagcatcagaagtgtaggcagccttggggactgagtcctcaacctgagggatctgatgctatctccaggtagacagtatcaaaatagagctgaggtagaggacacccactgcagaattcattgcttgcttgttggtggagagaaacccccacattcagtcacagaagccttctgtgtttattgttgtggtgcgagagaaaaggaaaaacaggttgcatgtgtgatttttcctaaggtgctcattgtgggggaggttgtcgtgtgtgtgtgtgtgtgtgtgtgtgtgtgtgtgtgtgtgtgtgtatttgtaacttttttttttttttttgagacagagtctcgctctgttgcccaggctggagtacagtggcatgatctcggctcactgcaacctctgcctcctgggttcaagtgattctcctgcctcagcctccccagtaactggaactacaggcacccaccaccacgcctggctaatttttttgtatttttagtagagacgaggtttcaccatgttggccacgctggtctccaactcctgatctcaggtgatccgccagcctcagccttccaaagtgctgggattacagacgtgagccactgcacccagcctgtagcttatgtttttgatactttaagaaacctttctatgttctgagttcatatagatatctgaaaatagtcttttaaagattgtccttttatatgtaggtccataatccaattggaacttatttttgaggattattttaaataagaatttaatttctgtatcttatggaaaaccaaaggtcccagatattttttgaataagtgttccctctgcctgtttttctgaatgttacctcttaatataccaggttttagtctatatatgggtttgactttaagctttattcagtttcattgatctctgtttccttataccagtaccacactgtcttaataaaaatagtttattagaaggataattatctgctagggaaaatctctacagcttgtttaaattctttagaatttcttgtttgccctttggacatcaatataaagtttagggtcaacttgtaaatttctatcagaaaacaacaaaatgctgttaacttttgattcaaattttaacttttgattcaaattttatttattctgtaatcaattctggaaattttaaaaattcattaacatggtatagctctccatttatttaggttttttcacttttttcagtgttttataattttctccaaaaaaggctttgcacatcttctgttagattaaattgtaaacattaaacatattagttttgttgctgtgttaaatgttatctatattttctgtttgttgctcatatatagaaatgaaattaacttcgtatgcattggccttatatccagcaaccttgccaatctctcctgttaataatatttttaaatatgtttggattttatgtatgagtagatatatttgtgaataatggtagtttcttcattttcaattcttataccttaatttatttttctgttgcctttgtcgtatctccagtataatatgaatcgaagtagtgataacaggcattcttgtccacttccggtcttaataagaatactttagcattttgttttttaataattttgatgcttaaaagttttggtacataccctttcattcctgtttgctagagtttcattgtggaaagcttttgagttttaacaaatgtttttctccatctgtgggtgatttttacctcttaataggttttagtttttcacatcttaatgtggtaaattacatacattttcaaatgttgaaccaacattgcattcccaagttaaacccatctttatatcttttccactttttgctagttgctgtttgccaatattttgtttgggtgttttgcatctgtatttattagtgaatttgatcttcagttttcctttcttgtcagatttcggaatcaaggttgattagtctcgtaaattctctttttcttctttagaaacatttgtgtaaaataaaaattatttgttttttgaatgtttggtagaactttgttcattttggcttggaatttttattgttaaaagaatttaaactaatcattcaatttgatatgttctaaaattctaggttttctatttctcctagaggcaattagggtatttttttctaaatatttttagttttgatgtaagttttcaaacttattagatgaagttgtccattatttttctggttctcaatgatttcttgatccgtgaattatttagaagtttgaaattgaaggcttttgtttggtacttgtttaattgtattatggttagagaatgggatctcttcaatatacatttattgaaagtattttgagacttgctttatttcttagggctagttttggtaaatattctttgtgtccttgaaaataatatgtattttctggttgttgaatacagtgtttgatatttgctcattaggttaagctcattaactgtgctggtcaaatcttctgtgtccttatgaatttaaaaaaaatgtctttgagccatcaattactgagagacatgttaaagaaacttctactctggtggtaaatacataaatttttttcttgtaattgtaacagcagttttttttatattttgaaggtatttcatttggtcatatgtttttagaatgttttatttttctagtgaattcttatattattgttactctctttaattctagtgactatctgattaagcaaaaagaattcacttaatattgttatagctatatttgccttttgttaatatttacttgatgtagttttttcctactcctttattctccggcttgctgtgtgtttctcttataagcagtatttggataaacattttttaaaatccagtctgataacctttatcttttaaccaaatgatggtggtggtcagttaaattttttggtactattaatagatttggatttattttccactacctcactttcttttataaattgtgccttttcaaatttttcttatttcttggtttttctccatctcctaatttgaatgttttacaatctatttctattctgtactggttaccttagaaaatctaacatttatagtcaccttaacaaaacctaaaattaattctaatctttatatttgaccactaaaaatacaagaacgtagccaggcacggtggctcacgcctgtaatcccagcactttgggaggccgaggcgggtggatcacgaggtcaagaaatcgagaccagcctggctaacatggtgaaaccccgtctctactaaaaatacaaaaattagctgggcgtggtggcatgcacctgcagtcccagctacttgggaggctgaggcaggagaatcgcttgaacccaggaggtggaggttgcagtgaaccaagatcgtgccactgcactccagcctgggcaacaagagcaaaactccatctcaaaaaacaaaacaaaacaaaacaccaagaaccttagactgtcttaacttcacttaccctcatttcagttattccttgcttttcttaaattattattttgctttatgaagttgtataatagaccattattatatttatttaatttagaccatattatatttagtgttgtttagatttatccacttttggctaggtgtggtggcttatggctgtaatcccagcactttgggaggccaaggcaggtgcatcacttcagtctaggagtttgagaccagcctgggcagcatggtgaaaccccgtctctacaaaatgcgaaaattagctgggtatggggtgtgtgcctgtagttccatttacttgggaggctgaggtgggagggtcgcctgagcccaggagttcaaggtacagtgagctgagaacgtgccactgcactaccgcctaggtgacagagcaaggctctgtctcaaaaaaaaaaacaaaacaaaaaattatccatgtttgtcattttccctgttcaccattctgtcccagaactttttcctgaagtaacttctttataaatatttatatactattcatatcaacttttattgttgttatgttttgttcatttatatgatagttttgctgtcatgcatagaagaagctttctctgtcagtcatagattgacagattttttttttttttgagatggagtcttgcactgtcacccgggctggagtgcagtggtgcaatctcggctcaccgcaacctccccaacccgcgttcaagcaattctcctgcctcagcctcccgagtagctgggattacagggcgtgccaccacgcctggctaattttttgtatttttagtagagatgggggtttcactatgttggccaggctggtctcaaactcctgagctcgtgatctgcccgcctcagcctcccaaagtgctgggattacaggcgtgagccattgtgcccggtgacagattatttttatgagtgctttaaagataccattccatgcttttctggcttctgttcttgcttttgagaagtcagttttcattaatatattcttccttgcaacttttaagaactttcttcttcttgccctggttattctgtattttcaatgtgatgtatctagatgtaaatttcagctgctgtagttgggatttattgtgattttttttatctgaccattaatggactctgggtaattatcagctattatctcttcacatattgtcactttcccattctctgtgtttatttttcttaaaactccagttacatgtgcctaagaccagactcaccagggataaattgatgctcccagcttcagttccaccttacttacttgaaagtgccttccacagtctgtttgacctctgagagtttaccttaatttcttgccagcttggtaatgcagctaaaagaaagtttttctatttctacaaaattgtaagcttttttgtaccaggaagatttgtcattataactagtctgctgtattgccagactactttaggtacctcatataagtggaatcatacagtatttgtccttttgtgactggcttatttcacttactgtaatgtcctcaagttatatctgtattatagcatatgtcagaatttcctcctcgtttaaggctgaataatctattgtacgtatataccacattttgtggtgatttcatggaatagcaaccagctattactcctctactcaaaccacttcaatgggtctccatctgtgttaggccattgcactgctataatgaaatataatacctgagactgggtaatttctacgaaaagaggtttaactggctgtcagttctgcaggctgtacaggaagcatagcggcatcttcctccgaggaggtctcaggaagcttccaattatggcagaaggtgaacagagagcaggcacatctcttggcaaaagccaggagtgcatgagagatgggggaggtgccacacacttttaaaggaccagatctcatgagaattcgctatcatgacactaccaacaggatggtactaaaccattcgtgaggactccacccccacgatccagtcacctcccaccaggccccacctccaacattggggattacatttcaacacgagatttggatggagctgtattaccatctgttacggtttggctctggatccccatccaaatctcatcttgaattgtaatccccatgtgttgagggagggacctggtgggaagtgattggatcttgggggcagtttacctcatgctgttctcatgatagtgaggaagttctcaagggacctgatggtttaaaagtggcagtttcccctgctttctctctctctctctctctctctctctttctttctctctctctctctccccctccccccctttctccctctctctgtctctcctgccaccttgtaaagaaggtgcgtgcttccccttcatcttctgccatgattgtaagtttcccgaggccttctcagccatgcagaactgtgagtcaattaaactacccagtctcaggtagtgtctttacagcaacgtgaaaatgttctaatacaccgtccctctcagagtagaagccaaattctttagaaggccggtgaagcttaaataatctcattaccttttacctcctgactttatatcctactactcactctatagccacactggccttcttaatattccccagacatagtaaacatgcttctagttttgggcctttgaaccagctgctgcctcttccctgaatgctttttccccagagacttgaatgactgactgactttttcactttcttcaaatctttgcttaaatgttaacttgttaatgattcctagctctaatttcatcagtatccatgacatcccctaccctgattttctttctctgaagcacgtagtatcttctaacataaaatgaaatttacttatttatcacttattttctgtctcttctaagaaaataacatccctgaaggtaaagatctttgttttgtgatattaaaagcatcagaacagtatctggcaaaaggtaaatatttgttcagtgaatgttcttgaatgaagcagctaaaagaatggagactgtttcagtgtctattttatgaatacaggcataaaattgtaaccaactctgaccacatctctaatttcttctgccctgagatttactgatttttcttttataattctaatcattccttcttaggtttctgtatgacctgttttcagtttctcttcttgtacacttcagaactgcaaaagccaatgttcctgtgggttttgctatttaattcacatattttactttacagatgtactttattaaatgtactttctgatactcaatagaggagacattttttcttattattacttttcaggctgggagcctatatgtgagactgaagaattaaccccaaagcaggatttttatgaagaacatcaatcccagaagataatagaaacacttacaagctataaccttgaatactccagtttgagagaagagtggaaatgtgagggctattttgaaaggcaaccaggtaatcagaaggcgtgtttcaaggaagagataatcactcatgaagaacccctttttgatgagagagaacaagaatataaatcttggggaagttttcatcagaacccactgctttgtacacaaaagataatccccaaagaggagaaagtacataaacatgacacacaaaagagaagctttaaaaaaaatttaatggctattaagcccaagagtgtctgtgcagagaagaaacttttgaaatgtaatgactgtgaaaaagtcttcagccagagttcatcccttactcttcatcaaagaattcatactggagagaaaccctataaatgtatagagtgtggaaaagccttcagccagagatcaaatcttgttcaacatcagaggattcatactggagaaaaaccctatgaatgtaaggaatgtaggaaagccttcagtcagaatgcacacctagttcaacatctgcgagttcatactggagaaaaaccttacgaatgtaaggtatgtcgaaaagccttcagccagtttgcctaccttgctcaacatcagagagttcacacgggagagaaaccctatgaatgtatcgaatgtgggaaagcatttagcaacagatcatccattgctcaacaccagagagttcatacaggagagaaaccctatgaatgtaatgtctgtgggaaagcatttagccttcgtgcataccttactgtacatcagagaatacatactggagagagaccctatgaatgtaaggaatgtgggaaggcctttagccagaattcacaccttgctcaacatcagagaattcatactggagaaaaaccttataagtgtcaggaatgtaggaaagcattcagccagattgcctaccttgctcagcatcaaagagttcatactggagagaaaccctatgaatgtattgaatgtgggaaggcttttagcaatgactcgtcccttactcaacatcagcgagttcatactggagagaaaccttatgaatgtactgtttgtggaaaggcttttagttactgtggatcccttgcccaacatcagagaattcatactggagagagaccctatgaatgtaaggaatgcaaaaaaaccttcaggcagcatgcacaccttgctcatcaccagagaattcacattggggagtcactgtcaccacccaacccagtcaatcaccaagtcctatagatcctgagtcctaaatgtttctagaatttatactgttttttatctttaatgttgtcaccttggtctgattcatctcactctgattactaatatagctttcaaacaggttttcctgtatttatttttgctacctttaaatccatttcccacaatgcactcaaacggatcttttttttctttttttttctttttgagacaatgtcttgctgtgttgcccaggctggagtacagtgggacgatctcagctcactgcaacctctgactcccagcctctgcctccagggttcaagcaattctcatgcatcagcctcccgagtagctgggactatagacatgcaccaccatgcctggctaatttttgtattttttagtagagatggggttttgccatgttggccaggctggtcttgaactcctgatctcaagtgatctgtctgtctcggcctcccaaagtgctgggattacaggcatgagccaccacgcccagcctcaaagtgttctttttaaagaataagaaaacacacatgggctgggtgtgatggctcatgcctgtaatcgcagcgctttgggaggccaaggcaggcagatcacccaaggtcaggagtttgagaccagccagactaacatggcgaaactccatctctactaaaaatacaaaattagccgggcgtggtggtgcacacttgtaatcccagctactctggaggctgaggcaggagcattgcttgaacccaggaggcagaggttgcagtgagccgagatggcgccattgcattccaacctgggcaacaaggctgcaactccgtctcaaaataaaaagaaaagaagagaaaagaaaacacatgttactatctccagttaaaactttttttttttttttgcttgttattgttcttagactaatattcacagcctttaaaattgtctgcaaggcttttgttatttggttcttacacaccattcagccttattttattccagtcttcttctttgggcactaggcacttcccaggactaagagcttagattctggaaaatcatagctccaacactactatggcattgcgtgactttgagcaatttgcttatctaaacctcagggttttctttaaatcttaaaataggaataatataggatactgtactgtagaaatgtaagtattaagtgaaatagtgtctgttgtagattgatgcatattaaatgagaaatttgcatgtaaaatacttcatatagtctgtcaaatatagcagatattcaataaatgataatagctaacatgtattgagtgcccactacacatcaggcactgtcttacatactctacatatattaactcatctactcctcacaaaacaagattccttattggacaaagtggagcattcctgcaaaacaccagttcagaatttggaaaatctaaaaatgttagaacataaatggcagtctttgtactgtagcttagtagttgttatgaagtcaggtagtggaactataacactgacagccagttttaggaagtttctacagataatgaattggataagccaattaagaaaaatagaattcactgggaagaatgcagaacctacatttaaatcaaggaaggaatagaaatggtcacaattaaccaaaaaaaatcaataaacatagaaattcatgtgatccccttaaataggcaccacaccctggccaggtgcagtagctcattcctgtaatcccagcactttgggaggccgaggtgggtggattatgaggtcaggagttcgagaccagcctgcctaacatggtgaaaccccatctctactaaaaatataacagttagccaggtgtggtggcgcacgcctgtaatcccagctactcaggaggctgaggcaagagaattgcttgaacccaggagacagaggttgcagtgagctgagatcgtgctactgcaccccagcctgggcaatacagcaagactccatctcaaaaaaaaaaaaaaaaaaaaaaaaaaagcactacccccagctaattgtatggttaaattcgggtaatttagaaggcatgtaaagtgttccatactatagaaaaatgtaaagttttaaaattatttatccagtggttgcaaaattgaaatcaaaaggggattaagggaagaaaacagatagatacacaaataatataggcattcattctgttaatattgagtaattactgtttgtcagacactgttttaggtatgaggaaatgacagtgagcaatacaaaggccacattctcatggagtaaaattccagaggtggagacatgtaattaatacttaaatataaaacagtagattttctaaacgcagaaaacggaagagtaacaagaaactaaatcaaggagcattatatagcctagactgcagagactcaatataataaagttggcgattcttcctaattatcaaatttactgcaattccagccaaaatgtttcagtggttttttttgtttgttgtttttgtttttgttttgccctttagcttcacaggtttgttctgaaatttatgaggtataaattcttaagagcagcaagaaaaatttcgaatctatttgtagaaactgcatatgatgatggttcataccagtagagagaaagattggatttgggggtattactagtagtaaggggattcactagtagtaagggaaatgcaaaataaaatcacattgaactagttcaaaatcatcacattggcaaaagcattagagtgccaattactggaaagatgtggagcaataggaacactcatacggtgctataggaagtagttgtgtttagcataatttggcaatgtctagtaaagttgaagatgtgaataatctttgacccagcaattccatgtttaaacctctacatagtctctcctcgtgtttcaaggagatacatatgatggtccattgcagaactgtgagaatgagaagttgaaagcaatctaaccattaggttaaatacaagatagaatgcaaactaaaatgaataactagagatatttctgtcaacatgggtaaacctcaaaaatagtattaatgaaattgaactacagactattttatataatacagtataacgtacaatttcaaaacatgcaaattagtgttatgtatttttgtcatggctaaatactatataaaaaggatctaaaagaattaataaaataatcatcagattcagaacagtggtgacctgcagggagaaagacaactgagattggggaaaggatgcaaatgaaaatacctttaattattcatttcttttaaaaataagcaaatactgtatagccaattcttaaaatttgataaagctggctgtgagtatatgagtcagttcttactctctgtatctttctgtataaactatttcataatgcaaaaaaataaagaatatttaaatgatgtttgcttctatcagttctttttttttttttcttttttgagatggaggctcactctgtcgcccaggctgtagtgcagtggcatgatctcggctcactgcaacctccgtctcccaggttcaagcgattctcctgcctcagcctcccaaatagctgggattacaggcacacgccaccacgctcagctaatttttgtatatttagtagagatgtgcttttgccgtgttggccaggctggtcttgaactcttgacctcaggtgatctgcctgcctcgacctcccaaagtgctgggattacaggcgtgagccactgtgccctgtcagttacttttttactattcccaaggtgtgccactggtattcctgtatccaccattttcttcagaaagaagcttatatatggtctatttgcagaggcaaccattgttaacaattttaagactatctttccatgtttgactcatttgagaatgacgttttatgctaagggttttataagcctaattttcccatcatcattcttattgttttcaggaccccattgtatatgcaccatgatttgttaatttccctttgtgtactaagtgtccagaatttttgtgggccaattactatcctttctgaactcaattttctcagatgttaaagggaggtaattctttgttttagaactgttacatgcatttgtcataatacatgttaaatttacagcagtatttagtaaaagttattattttataaaatatactgggggttgtgaaaggaaacaggaagggaaatggcatgaggctgttacagtagaagcaagcggtagagacagaaatttacttcagataggcagcatacagaaacaaatacatagtaactctggattttaaaatggatgcctaacttagtcactgtgattataatcaatatccagcagaatttgttgatagcttcccatttttattatatttttctcatttataagtcaatggaaaaataagcaattaagaatatcaaggaaattgtctatcactgtcaaagagaggcttcagacatccatagctgaatggttgaaaatatcaacagaaacaggatggcagagtgaggaagagtgcttgtccaccacactccaacacactgaagtgaaagttaaagcagtagataaaaattaaaacccggctgggcgcggtggctcatgcctataattccagcactttgggaggccaaggtgggtggatcacgaggtcaggagttcaagaccagcctggccaacatggtgaaaccccatctctactaaaaatacaaaaattagctgggcatggtggcgtgtgcctgtaatcccagctactcgggaggctgaggcaggagaattgcttcaaccgcgacctgggaggcagaggtagcagtgagccgaaattgcgccaccacactccagcttggacaacagagcgagactctatctcaaaaaaaaaaataaataaataaagcccttcttctcttccctattttgcctcattcactcattcatatcctttagatagagatacttgtggaatctgagctatagcctagtgtctcttttttttttttgagacggagcatttctctgttgcccaggctggatacagtggcgctatctcggctcactgcaacctctgcctccccagttcaagcaattatcctgcctcagcctcccgagcagctgggattacaggtgcccgccaccatgcccagctaatttttgtatttttagtagagacagggtttcaccagtttgtccaggctgatctcgaactcctgacctcgtgatctgcctgcctcagcctcccaaagtgctgggattacaggcatgagccaccgcgcctggccacatagtgtctgaaagtagttaaggaaataaaaactgcctatgtcatatcgtgtgactgtgctgtataaatcctatgctcatgaacagctctgaggtgagctgtattcaccaggcagccagttattgaacatggattatagactggcaagtggatacaaaagctggtgggtgtgaagtggtactacttatgggttttatttgcatttctctaatgactgatgatgttgcacatcctttcgtgtgtgtattggccatttgtatatcttctttggaaaagtgattattcaaatccacttccaattttaaattgaattgcctttttattgttgagctgtaagaggtcttcgtatattctgaatacaagggccttgtcagatatgctatttgcaaacattttcttccattttgtagactttcctttcactttcttgatagtgccctttgaagcaaaaaataaaaaacaactaaaaaaattgttaattttgatatactctaatttatctattttttcttttcttgtttatgcctttggtatcatagctaagaaactactaatctggccaggtgcggtgactcacacctggaatcccagccctttgggaggccatggcaggtggatggcttaagctcaggagtttgagaccagcctgggaaacatggtgaaaccccgtctctatacaaaatacaaaaattagccaggcatggtggcatgtgcctgtagcctgtagtctgaactactctggagtctgaggtagaaggatggtttgagccatgattggataatgggggcggttttccccatgctgttctcgtgatagtgagggagttctcatgagatctgatggtttaaaagcagcagtttcccctgctttctctctctctctcctgccaccttataaagaaggtgcctgcttccccttcaccttccaccataattgtaagtttcctgaccttccagccatgcagaactgtgagtcaattaaccctcttgagtgaagatatctctttgatatattgatttccttttttgtttgttttgttttgttttgtttttggatgtctacctagcagtgagatgagattgctggatcgtatggtagttctatttttgtttttttgagaaatctccagttttctataatagcatactaatttacatttccaccaatggtgtgtaaggattccctttcttcacatcctcaccaacacttgttatcttttgataataggcattttaactgaggtgagatagtatctcattgtggttttgatttgcatttccctgatgattagtgatgttgagcattttttcatatacccattggccatttgtatgtctcttttgagaaatgtttactcgaatcccttgcgcatcttaaaatcagatttttttgctattgtttaagttccttatatattttgcttatcccttattgaatgtctagtgtataaatattttcacccttactgtaggttgtctcttcactctactgattgttttctttgctgtgcagaaccttttcagcttgatataatctcatttgtctatttttgcttttgtctcctgagcttttgaggtcttacccaaacaatttttgcccagaccaatttgctgatcacttctccaatgttttcttctagcagttttatagttttgggtctgccatttaagtctttaatccattttgagtttatttttatgtatggtgagagatagggatgtagtctcgttcttctgtatatgcatattcagtttttccaacaccatttgttgaatatagtgtgctttcttcaatgtatgttcttggcacctttatagaaatgagttggcactaatttcacggatttatttctgggttctctgttcagttccatcagtctacatatctgtttttatgcccgtaccatgctcttttgattatcatagctttgtagtatattttgaagtcaggtagtgtgacacctccaggtttgttctttttgctcaggatttctttggctattcaaggtcttttggggttccatagtgaattttataattacttttaatatttctgtgaaaaatgtcatttatatttttataggtattgcatttaattggtagattctttgggtaatatggacattttaacaatattaattcttctaatccatagccatggaatatcctttcatgttttggtgtcctatttctttcagcagtgttttgtagtttttattgtggagatttttctcttctttggttaagtttattcctagggatttcattgtctttgtagccattgtaaatggaactaacttcttgatttcttttttagattgcttgctgttagcatagataaatcctattgatttttgtgtgttcattgtgtatcctggaactttactgtttatagttctaagagttttttggtggaatcttcaggtttttctaaatataagatcatttcatctgcaaacaaggacaatttgattactttccttctaatttgggtgtcctttatttcattctcttgcttaattgccctgggtaggacttccagtattatgttgaataaaagtggtaaaaatgggccgagcatggtggctcacgcttgtaatcccagcactttgggaggctgaggcagatggatcatctgagatcaggagttcgagaccagcctgaccaacatggagaaaccccatctctactaaaaaatacaaaattagctggcatggtagcgcatgcctgtaatcccagctattcaggaggctgaggcaggagaatcacttgaacccgggaagtggaggttgtagtgagctgagattgtgccattgcactcctgcctgggcaacaagagtgaaactctgtttaaaaaaaaaaaaaaaaagtaaaaatggcgtctttgtcttgttccagtccttagaggaaaggcttttaatttttcctgttcagtataatagctttgggattatgaagcccctcccttcttaaggggtcacctttttaaaaacaagaggactacaccaccacccaaccacaaaaacctcctgaggaactcatttagactgacaagaggtgcagaaagaggttaaataaggtgcttataactcctttttctccttcccctaatgatagcacctaactgaacacagtccattcatgcagaaaaggagagtaatttgaggatggtattgttaactaaaaccgtagcctttatggaaaattcaccactcttgcacaaacatccaggatccacatggctattgggagtgatttctcctgcattgcctccagcctttcctaacatgtccttctctctttgtctttcatatctgtgatggagcttcattcatgtgtgtgtattcctctgtttctgtgtgtcttttgaacaagtaaggttttgcaattaaagaatgactgaggccaggcgtggtggcttatgcctgtaatcccagcactttgggaggccaaggcaggtggatcacttgaggtcaggagtttgtttttttttttttttttttttgagacggagtcttgctgtgtcgcccaggctggagtgcagtggcacgatctcagctcactgcaatctccgcctcctgggttcacgccattctcctgcctcagcctcctgagtagctggaactacaggtgcccaccaccacgcccggctaattttttgtatttttagtagagacggggtttcactgtgttagccaggatggtctcgatctcctgaccttgtgattcgcctgcctcggccccccaaagtgctgggattacaggcatgagccaccgtgcccagccctggccaatatggtgaaaccctgtctctactaaaaatacaaaaaacttagccgagtgtgatggtgggtgcctatattcccagctacttgggaggctgagacaggaaaattgcttgaacctgagaggtggaggttgcagtgagctgagatcacgtcactgcactccagcctgggcgatagggcgagattctgtctcaaaacaaaacaaaacatatatccaaccacagccatccctggccttctaattcatgttgtctgttatttcatctgtactttcccttttattctttttttttttttctgtgcttggatgccaactttatttgtggtcaatataacttagagtcttcattttccatttttgtatatattctgttaatctatggtatcatctaccaagtcttctgccttaaaaaactcacagagatcatttcctttttgtaactcatcctctactctcttcattcaattagttacatgttgtacacatgtaccttaaaacttaaagtataataaaaaataaaaaaagaaaaaaaaagaaaagtaaattatgtcattcaatgatccaatgagagactactgcaatgacaaaatagttggtttggagagagttttctggagtccagtcctttttattctttttaagtagagacaaggtttcaccatgttgcccaggctggccttaaactcctggactcaagcaatctgccccctttggcctcccaaagtgctaggattacaggcgtgagatgctgcgtccagcccctttttattcttgagtgatatccagttcttctttcactgtatgtgacttcctaagagtgctaaatcttctggcttccactgatttccattgagaagtcctttttttttttttttttttaaaaaaaactttgcaagcttctttgtttttggtttcagcagatttcttctcatcttagttatgatttccttttcattagccttttaacaaatgtggtttttttttttgaaatggagtttcactcttatcgcacaggctggagtgcaatggcacgatcttggctcactgcaacctctgcctctgggttcaagcaattctcctgcctcagcctcctgaggagctgggattacaggcgtgcaccaccacacctggctaatttttgtatttttagtagagacggggttttaccatgttggccaggctggtcttgaactcctgacctcatgatccacctgcctcggcctcctcccaaagtgctgggattataggcatgagctactgcgcccatcagagacatgtttcttgaaagtatgcccttgtcaattaaaaaaaaaaaaccaaatagcccaggagtttgagaccagtctgggcaacatagaaagactccatctctacaaaaaataaataaaattagccaggcatggcgggacgtgcttgtaatcccagtcacttgggaggctgaggtgggaggatcacttgagctcaacaggttgagattgcagtgagccaagatggtgccactgcactccagcctaagtgacagagcaagaccctgtctcaaaagaaaaagaaaagaaaagagtaatccatagtgaggatgttaggaactattataaaatcataactaatgatggtcaaatgaaatataaaaataataaaaatatattattttcatttaccaaaaaagtgtgccttcttttcatctaccagttttctaatcttccagtattttctgcaccttctgaatctcttttccttccaggaccctgatttaataaaagtaagacttaattattatataccttgtgcctgtattagcttttttctcctcattttctcctgaaactctattacagaattcatgtcctcttttccacttgattaactttttgttccctgtgtgtaatctgatctttacatccattgtccttttagttatttgaaagtaatgaaaatcaccatttggattttttttttttttttttgacagagtttcactctgtcacacaggctggagtgcagtggtgcaatctcagctcactgcaacctccacctcctgggttcaaacaattctcatgcctcggcttcccaagtagctgggactacaggcacctgccaccacacccggctaatttttgtatttttagtacagactgggtttcaccatattgcccaggctggtcttgaactcctgatctcaagtgacccacctgccttggccccctaaaacgctgggattataggcatgagccaccatgcctggcccattttttttttctacaatagtttcaatcctctgccaaaactaaaatcttctatatgtttttatatactaggtatagttattttttataagtgccatatactttaaatcagttttattgtggtatgagttatgtatgtagtttaaaataaaataggccgggcacagtgggtcacgcctgtaatcccagcactttgggaggctcaggcaggcggatcacaatgtcaagagatcgagaccatcctggccaacatggtgaaacccggtctctactaaaaatacaaaaattagctgggtgtggtggtgagtgcctgtagtcctagctactcaggaggctgaggcagaagaattgcttggacctgggaggcagaggttgcattgagcctagatggcgccactgcactccaacctggtgatagagtaagactccatctcaataaataaataaaaataaaataaaatacatcaatcttaaggatgaagtttgatgaggttggacaaacaaaactgaaagtagaatatgcccataagaaaaacctcacacatgagaatgggcagaaactggaaaggctttgagaaactgttaatgaaagcaaaaagaaagaaccttgaagaaattttttttcactgtgttaatttatttaataactgacaattttattattatcaccgttttaaagatgagacaattatagcatagaaaattcaagtaaatgccccataacaccaacccctcaacctgtttcttcttatttcctggacccttggccatatgcgtggaatctgagaatggcatctagttggctttaaactcacactaatgaagctgcaatctggaggtcaggaagtttctggaaattgttgctggtgatgaattcacttagatgcgtacatctactggtctagacatcactccactgctgaaaaaaggcatctacctcccttctttatccaaatcttatttgaaagcatatctttggcagtaaccagactgtctttaggtgacttttagcaagttgtctaggaagtgaaattgttaggtttccagcccctgaaacaaaggtaagagcgcaaaaagaggtagaaattagtgctgattagaaataaacaatatctactaccacatatagaggacagagtgggaaataaaccccataatctaaacagaggcaactactgcagctcctataaagactttggaggcaggggtaggttctatgatgcaatggtatctacgtgccagcagataacaagggctagttgcaactgtaatgtatattcgtatttcttgaagactcaccattgtgggctaagagaagttgaatgagggcctcgaacccaaaccaaagcaacatctctagttcaaagctactctgtttagatgaatctgcttatactatctgttgtttctatttgatctcattcatgtggttctgttcccttgcatgctggatatctgtgacaacttgctggtcactgtacctgaaaaattatttgtggatgctccctcaggcgtaaagtgcctccagagtgggttctcatttaccccttccaggtatcaccagtccaacccatctcaaattgagttcataatgtgaaattccttaatttactgagcttatgaatccaaagcttcccatacctggtgaaatataaaaaggaaaaaaagaaaaacagggctttaccccaggaaaatcaaaccagaatttctggaggtgcccaagaattgggattttaaaaatctctttgggtgattttaagatgtagttagaattgagaacaaccaggctgggcgtggtggctcacgcctgtaatcccagcactttgggaggctgaggcgggtggatcacaaggtcaggagttcgagaccagcctggccaatatggtgaaaccccgtctctactaaaaatacaaaaattagctgggcatcgtggcaggaacctgtagtcccagctacttgggaggctgaggcaggataatcgcttgaacctgagaggcagaggttgcagtgagccgagatcgcaccattgcactccagcctgggcaacagagcgagactccgtctcaaaaaaaaaaaaaaaaaaaaaagaattgagaacaactggagatgaaccgagtatggagatcaggtcataaaaaaggaacctctagacttaaatattatttcctaatatgatctttaattgtggtcacttatagatagcattgaccataagctaacagactagaatctactgtttttttctttttcttttcactttttaatatagaaaaaaatcagacatatataaaaacagagaaaaaatatgaatagatcatcatgtattaattacaccaattcagcaattatcagcagtttgccaatttggtgttaagaaaaattatcagctgggcgccatggctcatgcctgtaatcccaacacttcgggaggccgaggcaggcggatcacctgaggtcaggagttcaaaaccagcctggccgacatggtgaaatccagtctctactaaaaatacaaaaattagccgggcatggtggtgtgtgcctgtagtcccagctactcaggaggctgagggaggagaatcacttgaacctgggaagcagaggctgtagtgagccgaaatcgcgccactgcactccagcctggacaacagagtgagacgccgtctcaaataataataataataataaattatcaaaaactagatgtatagagcacctttgacatacctaactccatcttagaaaaagactccatttcatttttcatagaacactttgccaacaggatgttttgcttaataaacaaaaaaaaagaataaagactgcatccaaccagttaaggacatgaacaagcacattcttccatcatcagttctcaccagaggactctgtgactataaaagattagggcttcagcagcttgaaacggccgtcttaactgacactatcttgtagttactcatgataagaacttggcatctgctgtggaaggctgtgccacatcaaaaactctttcttgcaagactgatggactgcctagtccagactaggacctcttttgtctttgcccatggactggttccttaaccctttctcctatctctttttcctcttgatattaaatgttactttgttgtagaatgtttgaccaagaatgtttatatattaagtacactattggccaggcgcagtggctcacacctgtaatcccagcactttgggaggttgagacaggcggatcatgaggtcaggagttcgagaccagcctggccaacatagtgaaacaccatctctactaaaactagaaaaaattagctggggatggtggtgcctatactcccagctactcgggaggctaaggcaggagaatcacttgaatccaggaggcagaggttgtggtgagccgatatcacgccactgcacttcagtttgggcaacagagtgagactctgacccccgcaaaaaaaaaaaaaaaaaaaaaaaaaaaaaagtacactattatatatgctttgcagtattgactgacttctggagtatcttgaacctgtgtgcctgcggctctgcctctggagtgaaggggaagtactaaggagaatgcctccttgggaactccacatagctcatggcttttgttattgaactagcatcaataaaagcctgacattgtggcaagatacaagcatgtgtgcccctggatatctctaaccttgcaccactcatgaaactaggaaataaggaaaaaatattattttgttatcccatatatctttgcaaagtcatactacagcacagtctaacaaactgttctagggactggttttccaacactcagcaccgtttacattttgggccagataatcctttgttacagaggactgttctctacaacacagagtggctggaagcattcttggcctcttcccactagatgccagtagtatcctacccccatcattgtgagaaccaaaattgtcttcaggcattgccaaatgtcccctggggcttaaaactgccccaggttgagaattcattgctctggtgtaatgaacctttatttgattgactgttatttattaggatgtaggtggtgtaaaaatagatgttaacttgcagacaactgatgcatttttcatttttcttttttttttttttttttgagatgtctcaccctgttgcccaggctggagtgcagtggcgtgatctggactcactgcaagctccacctcctgggttcacgccattctcctgcctcagcctcccaagtagctgggactacaggcacccaccaccatgcctggctaattttttgtatttttagtagagacggggtttcatcatgttagccaggatggtctcgatctcctgacctcgtgatctgcccgcctcggcctcccaaagtgctgggattacaggcgtgagccaccgcgcccagcagacaattgatgcattttcatatattcatctggtatagctacaaattgattctgtgtggaagaaataaccttaaaggtatggttttattgccctgtagggatattaaatagttttatatctaactttgcaatcttattcgaagattctattgtttttcactgaagataggtatatacctgttcacttggaaatcaatttccaatgcccttgctaataagtgaaatgaatctttgaatatctgtaaaagagttaaaaattataagtttttgaaaattatactttgatacttgtttcacccattgccccggtgctcttcctgcctccacatactctgaggacaggatgggctgtggcctctcctcatcccaggctacttccacggtcaaccttgatccaggagatggtcacatcccacccagatccagagcaccctacactcatgccaagatacagccctattgacactcaggccacagcctgggaaagatggcaagaccccatctctacaaaaaaataaaaataaaaataaattagctgggcatggtggtgtgtaccagtagtcccagctacttgggaggctgaggcagggggatcacttgaggccaggagttcaaggctgcagtgagccatgattgtgccactgcactctagcctgggcaacagagtaagatcctgtctctaaaaaaaaaaaaaaaaaaaaaaccaaaaagccaaactaaaccagacaaaacaccaaaaaataaaaataaaaaaaaaacagcaacaaactgaagggggcctgcccctccacacctgtgggtatttcttgcaaggtggagacgagagactgagaaaagaaataagacacaaagtatagaggaagaaaagtgggcccaggggaccagcgctcagcatacagaggacccgcgctggccccagtctctgaattccctcagtatttattgatcactatgttgaccatctcggagaggggcatgtggcaggactatagggtaatggtggggagagggtcagcaggaaaacgtgagcaaaggactctgtgtcataaataagtttaaggaaaggtgctgtgccttgatgtgcacgtaggccagatttatgtttaactttacacgaacatctcagtgcagtaaagagtattgccaccagcatgtctcagcaaccacaaggcggttttctcctatctcggtaaatagaatgtatgatcaggttttatgagacattccattcccagggacgagcaggagacagatgccttcctcttatctcaactgcaaagagggcttcctctttcactaatcctcctcagcacagaccctttacgggtgtcgggctgggggatggtcaggtctttcccttcccaggaggccatatctcaggctatcacatgggaagaaatcttggacaatacccaggctttcttgggcagaggtccctgtggccttcctcagtgtattgtgtccctgggtactcgagactggagattggtgatgacttttaccaagcatactgcctgcaaacacatttttcacaaagcacatcctgcacagccctaaatccattaaaccttgagtcaatacagcacctgtttctgcaagcacagggttggggctagggttacagattaacagcatctcaaggcagaagaatttctcttagtacagatcaaaatgaagtttcttatgtcttcctttctctacataaacacaataacagtctgatctatttttctttcccccacaacaaacaacactcaggcccaggtaaggtcctttctgctccagagcaaggaagcgctgtgcctccttttaggccaaatttggggccctgtacccttttaaatgatgacagtgtctagggccaccacatttagttcaaggcttggacctataggcataagctcactggaacaggtgagagctgatggtcactgcaggttgggttagcccagagccttggagctagtctgcctagaggctcctttctcgaattcctctgcctagaggaatcacactgtcataggccataaatgctaatgatgaccttggcagggtcctatctttctgcagactatgataaagttctgttacttcttttctcactccctctgttccctggcccacatcattactcaatactctgaatagtatgctttttcttttaaaaatgaaggtataatttacatataataacacaaataagtgttcactttgatgagtctttgacaattacgtaggcccatgaaactaccacataaaacaagacatagaacattttcctcaccccctaaattatcttcgaagtcatagccccagccaggcacagtggcttacgcctgtaatcccagcactttgggaggctgaggcatgcggatcgcttgaggtcaggagtttgagaccagcctggctaagatggtgaaacgccatctctactaaaaatacaaaaattagccgggtgtgatggcgcatgcctgtaatcccagctacctgggaggctgaggcacgagaatcacttgaacctggaaggaggttgcagtgggccgagatggagatctcaccactgcactccagcctgggagacagagtagagactctgtctcagaaaaaaaaaaaaaaaaaaaaaaaatagcccctggagtcaactgctttctgatttataactcaatagatctgttttgcctgttcttgagtttctcatgactggagtcctacagtgtgtactcttcttttacctgtttcctctttccatgtgtactccttccccaatcaagaggtcagctccttgagtagcctctatttttactcgagtactcagtcttctttttcccaattcagttgctgagatatatttaggttctaataaattttgggtaaaatttaataatgatgctaatgatcctttacttctgaataacacagaaacacccagctctgaatccttgttgctttatttactcactgaatgattacggacaggtcacctcacccccgtgttgcagtttcttttgaagcgtgatgataacactatctttacaatgtttgtggcagtctttaatgttattccaaaatatcgccagctcttcccatcccagaattatggtaggattacatgtctgctatcacactcctgggtggccatgtgacgtctcaaagactagtgaatggaaatgacatgtatagtttttgaggcagaacgtttaattcccagcaaaagaccctcaaaggctgtctttccctcggccttcatgagtgacaatttaccagttgtggctgctttattggtctaatcctagaataagaacagcccttgaagtgagcaggccagtgatcaatcaggcatttaataggcactttataaatactcattttacttcaatattattatttttgtttttttagagacagagtctcacccaggctggagtgcaatggcacaatcttggcccactgaaacctccacctcctgggttcagtgattctcctacctcagcctcccgagcagctggaattataggcgtccaccatgccggctaatttttgtatttttagtagagacggggttccaacatgttggccgggttggtcttgaactcctgacctcaggtgatctgcccaccttggcttctcaaagtgctggaattacatgtgtgagctaccatgcccagcctaaatggtgattttaaattaattactataatcacttcaaagtgttgtcatataaaccacttatattaaatcaaatgaagcaaggacccttgacctctttgttaaattttaaaaatctagcagagccataggcctttaatttttccatcgcaaggaagaagaggaaactggtaataatctcctctgacagaataatctcgcaactttaggaactttatttaaagaattcagaaatggggttgggcgcggtggctcacacctgtagtcccagcactttgggaggtcgaggcaggcggatcacctgaggtcgggagttcgagaccagcctgaccaacatggagaaaccccgtctctactaaaaatacaaaattagcctggcgtggtggtgcatgcctgtaatcccagctactcaggaggctgaggcaggagaatcgcttgaacccgggaggcagaggttgcggtgagctgaaattgcaccaatgcactccagcctaggcaacaagagcgaaactccgtctcaaaaaaaaaaaaaaagaagaaatgtcaattgtagcattttaacacagcattgaagttatctactgatgcatagcaaattaccctaaactcagaagcttaaaacaacaaacatgtagtatcttacacactttctgagggtgaggaatataggagctgctatagctgagtgcttgtgactgtgtctctcacgcagttgcagtcaaactattggcaggggctgctgtcatctcaaggtttgactggggctgggagatgtgcttccaagggtgatacacttggttataggaaggccccagctactcccaggctattgggtggagggcttagttccttgctacctgggcctctccataggctgtctcggtatcctcatgacatggcaactaacttctctcaaagtgggggcagcagcctttaagacagaactcaaggtgccatttattatatttaatctcagcagtgacatctatcactgctactgcattctattagtctcacagtccaaccctggtacaatgtgggagggaactacataagagtgtgaatagtaggaggtaggaatcattgggaaacattttgaggtcagttattgtatcagttgctaggatgaccagttggaattaggatttttttaaaaagccattttcataagacaaggcaatcttttctagagatgttccaatacctgtgatatgcggagcactgcgctaggtggtattcaaggcaggcctgtagtgaatgctgttggacccagccaccacccctgagcaatcatatgcagaccgctggcttcttaactgcagacacctacagactcagcctaagactttcccacgaggcaggctcgaagtgctggagctttaacacctctggagtggccctaaaacaattaggaagagagatggtgtagacatatgtaagcttcatcggcctggtggttgtgaaaacttggaagtggtttctacacaatcccccagaggtcccaagctgactgagccctcattgatccagagctaatctgctcacctatgcactgtatattcgttcccatcgctcccgtctcacttctccatcccccacctaccaaataaactgcttgcactcattctttcctcaggtcggcttctcgggcaagcctccttaggtaaaaaccttgctttcaacatttcctttccattatgcgctaagaactctgatctcttcccgctgcggcagccccgccctttccttgcggctccgccctttccgtgaagtcacgcccgtccttaggctgtctctgtctccctaagagcgagtctcttcgctgctctctaactcctagagctggctcagaaagagtttcacattgccataggggagctcctaggagaggctgcacccattgcacgtaagaagcggtaaaaatgtacgcggccatcttaccaggctgccggagacaaagaaagctcagctttgatgtctgggcgccaccatgttggccacaggaggttttggcatctgagatgctgagttaagagcagagacgacatctctgtttagggatccagggacacttccttctccttgtcctaaaatagccttatcttttggtctagcaaagggcttaatcatccgttttacggcacagttttaaacatggccgccccaggtaggagtcaagtgggcgtcgccatcatacctccaattacagctttgagaaacccagaatcctgttcactggaaggttgccgggtggcggctgacagcctcaaagtcgcaattgagtctgcgcaccggccattcaggatgggacgaccttataccgcggtgaggcggcgtggcaggacgaccaatttcagattcagggcgcggatgcagcataaatgggaaggcacggtttgagaaacggtcaaacctgggactagtggaggatagtgagctgccgactacggtggccgactgggtcagctatgggtgcccgtgagggtcaatgacaagggaactgaagggttaagagattcggcgtctgagcctcgcggggcctcagtggtggcggacagaggtttgcgggagtcagtggcacggtctctgaagaagatggattgggagtgtgtgggaatcaataaatgcgagttctgtgaaatgtcttgattttcagggtgcatggggtcagtaatagtggtcttcatgggtctggggtcagttgggatttttcagacactggtttagagatctttaaggttaatgatcggagcccgagaggatcagtgatcggaggttctaagttctgtgggcagtaatagtttgggtactggaattggtgattgtggaaactttggggttcaaatgagggaggtcagtggtgatgaatgtttggagaaatgttttgggccatcggtgattgagacttacttcatatcatcggtggaggatcggagagtattaacgattggacttttgtagatcagggaatggagaatagagtcaagtgtgcttatcttaaaggtacgcctcaatgaggctcagtgattcggactgtcacttgtgggtgggagtgggactgtgagaatcaacaattgatcctcagtcgttgggatatcattggcaatcagtgtggattcatgattgggggctgtgtaatttcactggcaatcagatcggatcggtgttctttgtagttactgacctgtagtctctcctggtcagatttgaacataggggaatatcagtgactatgaaaacctctgagggttggagattggaggccagtgattgggggcactatgcgtgtctgattaggagacttataggggttggtgttgagggtcctgaaatgtggagattggggatgggaaaatcacagatttgaggctgcaagcctgcatagcgggaacacatttcactcaggtgacactccctagctgaatagcagccagttcctctccaccaaggcccatctgaaaactcttttttgaacccacaccctttttattgttctctacaataatgaaaataatttgaaaggatcgcgtgctaaacttatctaaagtaacatgttactaaagacgtggcttctattcttgttagggatctaatgcatattttttcctaatgtttcctttaaggctctttctggcaaaggtaatgacatacgcatctgtgccagcatcccaagagtgaggctggtttctggaaatccattctgactctgtgacagcggggatggatgtgaccttgcccgtggttagaaaacaaatttactgagtaagtatctaaaatgataatgtaggctgtgtgcagtggttcatgcctgtaatcccagcactttgggaggctgaggtgggtggatcatttgaagtcaggaattactagcctggtcaacatggtgaaaccctgcctctactaaaaacacaaaaattagccgggcgtggtggcgggcgcctgaggtcccagctactctggaggctgaggcaggagaatcgtttgaacccaagaggtggagattgcagtgaaacgagattgtaccactgcactccagcccgggtgacagaatgagactctgtctcaagataaataaataaatataaataaacaaaataaaataaaatgataatgtaaaagatttggctgaaagagcaaacagagtgtttagaaaatacttttatctaggctcaacttaaattatcaaaggaagagaaactagatttggaatttattgtattctgagaaactttttgccttgtcctatatattttaggcatagccatttttaacctccactaatcaattccttataaagtcctggcagaaaaaattcaagacagataaagccacaaccgccacaaaacaaaatgtaagctacttttagaaactgttcctcactgaaattaaaattgaactaatagttattaaaatggctgagatgggattgcaaataaaatggaaataagatttgaaaaaatagatttaggggatataagtgcagttttgttacatgggtatatttcacagtggggaagcctgggcttttagtgtaactatcacttgaataatgtacattgtaccaatctgataatttctcatcccttacccgcttcctaccctccctccattcagagtcatctgtgtctattattctgctttctatatccatgtgtacacattattatcttataagtgagaacatgcagtatttgactttctatttctgagttagaaaataagattttgaccattaatgaaaaagtgcaatgtcaaaacaatattttaattttaaaaaattattacgtttgatctttatgtaaccttcagacaaagcacaatgcctgtagcatcttaagaaataaaggcagctggatgctaaggcaggtaacatctttcagaacccacataggtcaaattttagttttaaaagcagatagtccctgtttttcacttgcacagaatcaaagacagatagctgcttagcatgggtgaaataataagccagggtaaggagtttgggtaattttttctccatgttgattcccttcaccacctatactgtgctcagtgccaggtttcagagcaaataattaaaaagaaattttacataaactttttattgtgatatatatgcaaaaatgtatataaatatgtagctcaatgaattgtcacaagggaatacccctgggtaatgcactcagatcagaaaacaacattctagcaccgtgccctcatgatgcccctcccagtcactactctgccagaggttccctagcttctaatcttagtattgtctgtttttgatctctaatttaatgggatattcattgggggggaggagcaccatggggagaggcaagatgtggctgtgtttaaacaaaatttccaagtttgaattgagataatttcatttatataacagatacttttccaggtcattaaatattccttgtttggccaggcacagtggcttacacctgtaatctcagtgctttggaaggctggggtaggagggttgtttgaggccaggatcttgagaccagcctgcgcaacatagcgaaactccatcattacaaaaaatttaaaaataagctgggtagtctgggcatgttggctgatgcctgtaatcccagcactttgggaggccgaggcaggtggaccacttgaggtcaggagttcaagaccagcctggccaacatggtgaaactccgtctctactaaaactacaaaaaaaaaaaaaaattagctgggcttggtggtgggcgcctgtaatcccaactacttgggaggctgaggcaggagaattagttaaacccaggaggcagaggttacagtgagccgagattgcaccactgcattccagcctgggcaacaagagtgaaactccatctcaaaaaaaaaaaaaaaaaaattagctgggtgtggtggctcacacttgtgatcctagctactggaaaggctgaagtgagaggattccttgagcccaggagttcaaggttgcagtgagctatgattgtgccactgcaccctagcctgggtgacagagtgagaccctgtttcaaaaaaaaaaattcttttcttttttttttttgagacagggtctcactctattgcccaggctggagtgcagtggcacgatctcggcttactgcaacccctgcctcccaggttcacaccagtctcctgcctcagcctcccgagtagctgggactacaggtgcccatgaccacgcccagctacttttttgtatttttagtagagacgggggtttcactgtgttagccaggatggtctcaatctcctgacctcgtgatccgcccacctcagtctcccaaagtgctgggattacaggcgtgagccaccacacccggccaaaaaattctttaaaaaaattgaggcataatacacatgtagtgaagtgggcttatctttaaggtgcagctcaatgaatttttatattacagagtcctgtaaccacagcctagatcaagatattcatcacttctaacacctggaaggtgtccttactggtcaatacctactgccaccctaggggtaactagtgtttaatatagtggattacttttgcatgcttttgaatttgaattgaattatatatctcccctgtgaatccacttgattgactcatattcactgaatttgataggattccatttgaatcatataaacgtgaagccaaggcattcataccatgaggtaattttgtttgaaattctgaaaccacatgaataccaggacaaaattctaagctgaatgccgggcgtggtggctcatgcctgtaatcccagcactttgcaaggatgaggtgggaggatcaggagcttgagaccagcctggccaacacagtgaaaacccatctctactaaaaatacaaaaatcagatgggcatggtgacaagcacctgtaatcccagctgctcaggaggctgaggcaggagaatcatttgcacctgagaggcagaggttgcggtgagctgagattgcaccactgcactctagcctgagcaacagaacaagactctgtctcaaaaaaataaaaaagaaattctaatctgaagttctggcttggccatctgagattgcctcttttctattattctccctggaagccaaaaacatacacagtgaactagaccctgaggttttaaagtgggtttctagtagggtcccattaatgaagctaacggttaaggactcttctcagtaggtagtttggagggggattttcagtcccttggtcaaaatctcttagtctttagggactgaccattgactacagagacctgaatgaagtagcgtgaaaaagagcctctctagaggctggctgcttgagggccaagacatagtggtgactcaacaaatgcagggttatctcggaggagtctgccttagggattctggaagctgctggtagattcactcccaggcagagatgcctctgtccctcacatacaacctgacaatatgggaaagcagctaacctcttctttaatcttttcatcttgctcacctttccacacacataagagattattgttttgttttggttttgattttaaataatttcagatttagaaaagttataagaataggcccggtgtggtggctcatgcctgtaatcccagcactttgggaggccgaggtgggtggatcacgaggtcaagagattgagaccatcctggccaacatgatgaaaccctgtctctactaaaaatacaaaaattagccaggggtggtggtgcgtgcctgtagtcccagctactcaggaggctgaggcaggagaatcacttgaaccagggagtcagaggttgcagtgagccgagatcacgccactacactccagcctggcgacagagcaagactccgtttcaaaataataataatactaacaataataataataatacagaaattcctgttatacccttcaccccattctgtaattaagattttgctgtgtgtgtagagactttctttttctgtctctctgtctgtaagttgtgaacatgatgaccctttactcctaatgtgtatttcctaggtaatatacattttgtatgtgatcacaataattaactaaccacaatataatgatcgaaagcagggaagttaacattgaaatattattatctgatgcatagactttatttagatttctccacttgtttcaataatatcatttatgttcattccttttaatggtccaggattctaatccagtgttacatgttgtatttagttgtcatatctctttagacttctttaatttggagtatgttctcggtcatttttttttacctcttttaactttgacatgtatgaggagttcaggccagttatttttataatttgaatttttctgatttttcctcatgattagagtcatgttgtacatctcggacaggaatactacagaagtgatcatgtgtccttctcaatgtaccataccagaaggtacacagtgttggtttgtcacattaatggtgatgttagctttgatcacttgatcaaggctatgcccaccagggttctccactataaagttatattattactaagtatgttgtagagagatattttgagatcatgtaattaacctcaaactttcatccactagagttagtatccattaatgatgcttacgtgactcaattacttctaattatggttaccaaatggtgattttccaattgtgtccttccttctgtatttattgtagaagctttcccttttcttcatctggaggatatcagtacaaaagtcctatttgcatacaaaataggaggtgcacattagacacttacaaaactgtttaaaatgttgagttagaccatacgccaaaactcagaccttctgaatcacaaagaaaacatcttgggaaattgactagttacagagaaacagttgtcacatcatgtgacaaagtgatgtctccacacagacaggaaacatctgggttccactctgggccagacagatttctgcagtgttctcagaatgaggtattggcaactaagaagacaaagaaagaaactttcagaaacgtggtaaaactgtcaaaaccacatgacatgatctatatgtgctgtaaaacctaactcttaattttgtttattctgtgacagtgaatcatattatgtattttttaatgaagatggaaaagattagatgagcgaatatggtatggtgccttcaactgagttatacccaactgtgattgattttctgtagtttttattttctgtcttgatgaaacattcagtcaaggaagttagaaaatatatatgagaagtggaaggaattaatataaaaagaaaaattaacgatctaaaaaaggaaaaaggtaaagctgataaatctgattttaataaaagtcaataatatagataaaccattagcaaaccttatcaagtcaggaggaaatgaacagatatacaaattaggaatgtaaaaaggggaataaccatattattaagaaatatttttgtaacactttcatagatttcaaaggtggcatgcaaaagattttttcagaatacatatgtaaaacttccttaagaagagaaaatgaaaagatcaatagctatgaacgattaaaatacttgaaaaagttcctgtccaccatctcaactatcaggttagataggtcaattggtgatttcttattgagccttaaagtgacttccaagtaacacactattctttagttcaagaccagcctgggcaatatggcaaaaccctatctctgcaaaaaatacaaaaattatctgggcgtggtcttgtacacctatagtttcagctacttgggaggctgaggtgggagggtcgcttgagtctggtaggttaagactgcagtgagccatgattgtgccactgcactccagcgtgggtgacagagtgagaccctgtctccagtagatagatagatagacagatagatagatagatagatagatagatagatagatagactcttccagggaatttataaaggaatacaccattacccaacccttttttttttatataaagccaacattgttgcattgattccaaaaactggaaaaggtggcatttcaaaagaaaaccatagcccaaccttcttatgaatgtacatgtaaaattagcaatatgttaaataatgcattatgactgagaataaatttatcctgaaagtgtaagttcaatattaaagaatttactaatgaattttaccatgttaataggacaagggagaataccatagccgcctcatagatgggaaaaaagtatttgataaaattcaacatctgttctggattttaaaaaacataatgaaatagaacaatttggatactttcttaacttgataagacctatgtctcaagtgaaaagtcagtagcagacgtaatggcagaactctgcttaccttcccattcaagtgaacacccttccctgctttgatttgctttcctctagagtgcctgccagtgcagttaatcagggaatgaaataagaaacagaagtattggacaagacaagaaaaaactgtatttgtagatgaaataattgtctatcccaaaagctctggaagattaaccattatagttattaaggaagttcagtaagggggctggtttaaaatgactgtaggaaaatggattaatgacttttttctttttttcttttttctttttttttttgagatggagtctcactctgtcgcccaggctggagtgcagtggcgcaatctcagctcactgcaagctccgcttcccgggtccacgccattctcctgactcagcctcccaagtagctaggaccacaggtgcccgccaccccacccggccaatttttttgtatttttagtagagacggggtttcaccgtgttagccaggatggtctcaatctcctgaccttgtgatccgcccacctcggcctcccaaagtggtgggattacaggcgtgagccaccgcgcccagcctgatgactttttttattgcagtcagtaattaaaaggatgaaaatatgccatttagaatggtaactgaaaacacagttgactatccagtaacagatgaaagagaaaattggagtacctgtgtgaaagcataaaacattgcattttgagatgtatagaaagtcttgaataaatattgaagccttgttcttggattggaagactcgacaattttaaaaattgtcagtattttcttatatgaatggacaaattcagtgcaatgttaagcaaaatcttaagaagggatctctttgccccaaattgtaacagaataattctgcagtttatgttgaagatgaaacatttgagaatatctaggacatttatgaaaaataagtaacaagaggtaatgtgctagacaaagctttcaaacatacagcttcaggagatagaggctacgacctaagaggaagaataagttgaggtagaagatactgagttcacttttgtgaaaccacaatgggtggcaatgagagatctatgaactagtttgttttgttttgttttgagacaagagtttccctcttcttgcccaggctggagtgcagtggcgcgatctcggctcactgcaacctccacctcctgggttcaggcgattcttctgcctcagcctcccaagtagctgggattacaggcatgtgctgctacacccggctaatttttgcatttttagtagagacggggtttcaccatgtcagtcaggctggtctcaaactcctgacctcaggtgatctacctgccccggcctcccaagtgctgggattacaggtgtgagccactgtgcccggcctatgatctagttttaagattgtgactgagagcatccagatgatggtatctatatggtaaaatatggcttttgagttcaaatgttagggactgataagggtgtgtaagtcacaatcacgtcacaatgctgactgagatggtgcccatcagatggctgccatgctgctagaagagtgccggactgcagggcaatactgctttccaagattgactcttttttttttcttttttaaattttgattcttgctctgtcacccacactggagtacagtggtacgatctcagctcactgtaacctccacctcccaggttcaagcaattcttcttcctcagcctcctgtgtagctgggactacaggtgtgaccaccacacccagctaatttttgtatttttagtagagatggggtttcaccatgttggccaggcaggtcttgaactcctggcctcaagcgatctgcccacctcggcctcccaaaatgctgggattacaggcatgagccactgtgcccggcctgagattgactctttactaagaaagataatgattgaccttcatcttcaagtggattctccccatagttgcccagttttagggaggaattggggctgagggaggaagggaactttgtttttcacatttccttacttcatcaggataggtggcactgattttatctgccacacttggctctgtgtgcagatgggcatccccagtaggaaaaaatctgtttttaaataaaaaaggaaaattactagactaattttaccttgttgaaggaaatcgaagcaaatattcatcatagttctaccatatgtatccaattactgtttcctgccttcatattttagtctgtatctacagctggaggtgattttagtaatctacagctggaggtgcctgtaatcccagctacttgggaggctcaggcaggagaatcccttgaatccaggaggtagaggctgcagtgagctgagatcgcaccaccgcactccagcctgggcaacaagagagaaactctgtctcaaaaaaaaaaaaaaaaaaaatgtgcacagcaaatgttacattgctcttttagaaggcaaatctgtctctgagaggcagcaagactgagaagttataaacccaagcgccacagccaggctagtcgggtctgtatctcactgctgctgtgtgctagttcttcagctctctcaggcactacgtctttatgtagaaatggagtaggactcggtttagagggcagtgtgaggaataaatgagtccatatgaggaaataaccttgcacagtgcctaagttgagatcagggctcaataactacaagctaggttttttttttctatttctatcagtttctatgatgtgtcatagttttatttgttcttcctgtgtgtgcttgttttgatttgtcattattgtacattttgttattgttattattgctgttacccaaataaatgtataattatgaggctattggaaaagttagaaaatgaacacttcgaaaatgaaacgtaaattcctttcagtcccttcactcagagaaagcaatgttaatattttcatagattcggacttacataattttaaaaatagaattatgcttcacattgtatgttatgacttgtattttctgcttcaaaatacatcacaaatgcagttccaagtcggagtacaccactccattattattattattattattattttctgaggcagagtctcgctctgtcgcccaggctggagtgcagtggcgcaatctcggctcgctgcaacctccgcctcctgggttcaagcaattctcctgcctcagcctcccgagtagctgggattacaggcccctcccaccatgcccagctaattttttctgtttttagtagagacaaggtttcaccatgttggccaggctagtctcgaactcctgacctcagttgatctgcccgccttggcctcccaaagtgctggcattacaaggtgtgagaaatggcacctggcctccactactatttctaatgcctgccttgtgttccattctgtggctcaccaatatcagcctgccaatcttttaattgctgggacaggctaggtgtggtggctcacacctataatcccagcactttgggaggccagggtaggtggattgcttgagtccgggagtccaagaccagcccgaaaaacatggtgaaaccctgtctctacaaaaaaaaaaaaaaaaaaaattacccaggtatgttggtgcacatctatagtcctcctactcgggaggctgaggtgggaggatcacctgagcctgggagtttgaggctgcagcaagccatgatcatgccactgtactccagcctatctcaaataaagaaatagataatgaaaaaaaaataaattattgttgggacattttgattgcttccagttgttttacttttgtaagcaaaggtgagatgaacatccttgtacctttatcttttattttagcgagactaattagttccttgagacacattattggatgttgaagagtggtttaatgagtgtgcactctaaaaattctgatagggctgggcgcggtggctcacgcctgtaatctcagcactttccgaggccgaggtgggcggatcacgaggtcaggagattgagaccatcctggctaacgcggtgaaaccctgtctctactaaaaatacaaaaaaattagccggcgtggtggcaggtgcctgtagtcccagctactcgggaggctgaggcaggagaatggcgtgaacccaggaggcagagcttgtagtgagctgagatcatgccactgcactccagcctgggcagcagagcaagactccgactcaaaaacaaaaaaaattctgatataaattcccttcagaaagctggaatatcctgccctcctaccagcagtgtaagagatatgatttccatctttgccaatcttataagccaaaaagaccattttaataatcttgtggaaaagacttttactaaaaatactaccagaagcagaaactataaggggaaaatatcaacaagttgactattaaaaataaccaataaaacttgtttggtatttggaaactaataaacccagtttaaggacaaatgacaaataaggacaaatgttatactataaaaacatatttataacaaatatgacaaaggattaatagcctcaatatagaaagaacacttgtaaatgaatttttgaaaataactcaggaaaatcaaaagttaagagcataaacagattgtttacaaaagaaatgcaaatggccaataaatagatgaggaaaatatctttctccattggaaatcaaagaagggtaaaataataaataaatgatagggatactgagacacagatagactaagtaactcattcaacatcacacatcagtaaatggcagagcctgcatttgaacccaggttgtctggctcccgagtctgtttgacagcctctttctgttttcacaggtgaggaaacaggcctagagaggtaaagtgtctagcccagattctctcagtcagtcagaggaattacttagcttcaaacttgtatctgagtcattccttggctcagggagtgactcagacacaagggtctttgtgggagttccccctgtcccagtcccagaacagagccatcactcagctgtctcctgcacagcctctgcaggcttttccccctgaggccccaggcagtgtttggggaaggacgattggatgactcaccatgggatctgcttatcttcaggttctctgggtgccctgcagacctttggatcctgccaccttgctggacgggagggctctctagctcctgccagcccttagagccacaggaccttggtcacaacatctacagaaggccctgcagctaagtgtgagttactgttgagagatggagctgtgagtgcctgggcaggccaggttaaagacactgtccaggagaagggaacttgggatgaaaattcccttctgaaggaatcactcagaccccatacctcttgtcagagcaaagactcccacataaaaggaaatagcttcatccctgagccagaagctgagcaagaccaaacctgaagacgttactctttccagggactctccatggctaaatgaagggaggatggttggcccaagatccaggaagacagagtgaagggagaggtagggaggccagagtctcatggcgggtgcgataggcatgttctttcaggagaagggggcatctttctagcccattgcgttctgctatcttgtggtatggggtgtggcccatctgcttctttattcttgctggacctctctagacttgctctcccgtcatttttggcacctcacctggcctctaggaatgtgattagttcactccatcctgactcagaggcagaaatggccctggattctcagaatggtggtggtggcagaatttatggacctactgtatataattttgttttgttttgttttttgagacggagtttcactcttgccacccaggctggagtacaatggcagaatctcagaattacagacatgcaccaccatgcccggctaattttttttttttttcgagatgaagtctcactctgtcgcccaggctggagtgcagtggcacattctcggctcactgcaagctccacctcctgggttcacgccattctcctgcctcagcctcccaaatagctgggactacaggtgtgtgccaccatgcccggcttattttttttatttttagtagacacggggtttcaccgtgttagccagaatggtctcaatctcctgaccttgtgatctgcccgcctcggcctcccaaagtgctgggattacaggcgtgagccactgtgcctgtcctgatttttgtatttttagtagagatggagtttcaccatgttgaccaggctggtctcgaacttacgacctcaagcgatccacccacctcggcctcccaaagtgctgggattacaggcatgaatcaccatgcatggtcaattctctttttttttttttttttttttttgagacagagtttcgctcttgttgcccaggctggagtgcaatggcgcgatctctgctcactgcagcctccacctcccaggttcaagggatcaagggattctcctgcctcagcctcctgagtagctgggattataggcacgcttcaccacgcctggctaattttgtacttttagtagagatggggtttcactatgttggtcaggcttgtctcgaactcccaacctcaggtgatacacctgccttggcctcccaaagtgctgggattataggcgtgagccaccgcacccagccttttgtttttaactaaacattttatttggaaatttttttccaaaaaaaagcaagaatatttctgtggtctcctatgtattccttacctagattcatctatataaagccatgtttgcatgtcctctctttctatatacaaatatatatgtatatagataattatgttatatcataaatatatcattcctattctttctttaactacttaagactaacttgcagacatgatgctcctttacccataagtacttcagggtatattttctaagaataagaacttttttttatgtaaccagtagttttcaaaaccaggcatttgacactgattacaaagtcagtgttataatgatttaataatcatgataactagattaatgtagaccatagactagattaatccagtctacaatcagatgtcaactaatactgtcactttatagcaacttttctttcttgctttttcttattttttgagaccaagtctcgctcttgtcacccaggttggagtgcaatggcgcgatcttggctcactgcaacctctgcctcctgggttcaaatgattctcctgcctcagcctcctgagtagctgggattacaggtgcctgccagcacacccggcaaatttttgtatttttagtagagatggggtttcaccatgttggccaggctggtctcgaactcctgacctcaggcgatgtacccacctcggcctcccaaagtgctgggattacaggggtgagccactgtgcccgggcctatagcaacttttcttttctttttccattccaggatctaatccaggatcatatgctgcctttaggtgacacatccctttagtctcctttaatcaggagcagtttctcagtgttcatcttccatgaagtcgacatttttgaagagtataggtaggttattttgtatattgtaactcagtatggttttgtctgatgtctcctcattgattaggttcaggtatgcatttggggtgtgaacaccacagaagggatgttgtacccttcacagtgcattatatcaggaggcacatgatgtcttatatctcattactggtcacgttaactgatcacttgactaagtgatactgccaagtttttccaaggcaaagttacttcttttccttttataatcattaaatgtcttggggtgtggggcatttagatactatggcaaccatgctttatggtctatgctttatgacctatataatatttcaaagtatttgaaacaaataagagataaagggtatttatttgtttgtttatttatttatttaatttttgagacagggtcttactctgtcacctaggccagattgcagtagtgggatcatggctcactgcagctttgacctcctaggctcaagtgatccccccacctcagcctcctgggtagctgggactataggtgtgcaacaccatacctggctaattttttatctttttttgtagagacggggctttgccatattgcccaggctggtccctaactcctggcctcaaataaggtgtaagccaccacacccagctaaaagcatggatttttgtacaatatttacaaagggaatttgcaatttccaagacaggcctagctctttacactctgttctctgttctctctttctccatcttcttccccccacatgtctacaggtgtcagatctttttcaagaacagcagaaaatgatcgaataccaggtaagtatcacattaagtagcccagttttccttcctggggaaactgtcctagaggaaaaaaagggtgtgcattgtaagtatgtacagtttgtacatacaggctgggttctcagggaagctgactcatagatggagatttttctcacaggaggttgattaggcaggctcttagaacacctgtaagacagtgagggaagctggattgggctgagggaattgttgaacagaggccttagtggatcttatcctctggagctgggatggccttcagcattgttgtgaatggaggcaaggaggcttttatattctgaaatcaactaatcattgattgtaggctgccccgaggagggtagatatccttggatggtgcagtaccctttggccaaggataattctcagaaaggttttaagccggccgctaggggtagctcatgcctgtaatcccggcactttgggaggccaaggcagttgcataacctgaggtcaggagtttgagaccagcctggccaacatggtgaaagcctgcctctattaaaaatacaaaaattagttgggcatggtggtgggtgcctgtaatcccagctactcgggaggctgaggcaggagaattgcttgaacctgggaggtggaggttgcagtgagccaagatggcaccattgcactccagcctgggcaacaagagcaaaactccatctcaaaataataataataataataataataataataataataataataataaagggttttaagcctgcaagagcctcctttctatatgtagatacagtggcaagatacttaacacatactgctgtaaccaacatgttatctttattttttgtaaagatggggtcttacttaaaaccataccatttttttaaaccagatatgtaatgcttcatcgtatgcaagggaatatgactgatttgaccagtccctcatttgatggacatttgggtaattttcagacttgatattacaagtagtgatgcaaggaacattctcttttggattaccaatgtacaaagtggagagtccaagagtcagtaactgatcttcctggtagcccaacaaaaaggcaaatacagttagcccaagatttgtactgtttataaggaagaagcctattgttatctccagtggaaaattagcatttcaaggcagtttttgaaggtgttttccaagacgccttcttaggactgaagtagaaaagcacagcctctcacagtgtggtcccgggacctgggcgtctcctgggagcctgtgggaaatatggaacggcaggctccgcccctggcctgcttcatggggtgatttgtaggtgtagcctgggaatgtgtgtttaaaaggctttggatgatctttacgcacataaaagtatgaaaaacattgatagtgatagtagacaaagttcttaataactaataaatccgaaataggttttttatattgtttccccttggaatagagtgttagacccaaggcagaactcccagtttttcaggtgaccaaaactgccaagtgctagctccccaatgatacgacaatgttttctatctgtgtcaaagctgtaggaagtcctaactcttctgttgcttgcgatccacatatataatggaaggaaatgctgcatgtcagtgagaagaaagtgaaaatacaaatgatttctttctgttttctctcttttttttttttttgagttggagtcttgctctctgtcgcccaggctggagtgcagtggtgcaatcttggctcactgccaactcctccttccgggttcacgccattctcctgcctcagcctcctgagtagctgggactacaggcgcctgccaccatgcccggctaattttttgtagttttagtagagacagggtttcaccgtgttagccaggatggtctcgatctcctgaccttgtgatcctcccgcctcggcctcccaaagtgctgggattacaggcgtgagccaccgtgcctggcctttttttttttttttttgagacggagtctcgctctgtcactcaggctggagtgcagtggcacgatctcggctcactgcaagctctgactccctggttcaagcgattctcctgccttagcctcctaagtagctgggactacaggcgcccaccatcaaacccagctaacttttgtatttttagtagagacagggtttcgatggtctcgatctcctgacctcgtgatccacctgcctcggcctcccaaagtgctgggattacaggcgtgagccaccgtgcctggccaataggaatgatttctgtttaaggggtcagagggctgcttcaagtgtacagaagccctgaatttgatccaaggcagctgtagccttgatctggactgaggaacagatgtactgcccagcatttaaatgactgtcattcttcttatatgtgtgttctagtttggtagcaaacagttacacatcttattcctgggaatgtctcagtgtgaggtgttcccagcccccaagggccctgtgtcctgagaagacttctcctttccctgagtttctcattcctgcctcctcctccatcccttctcagtttcccatcacaggagatggtgccatcccatcgggcaggccgggaccctgagatttacccttgacttcctccctacttttccccctccttctacccagtcaccatgccgtgctaatttttaaaagttcagtgattctttttatttttttgaaacagggtcttactcactggagccttgaactcctgggctcaagcgatcctcccatttcagcctcccgagtagctgggactataggcgcatgccactatgcccagctaatttttttattttttgtaaagatgggatcttactatattacccaggctggtcttgagcttctgggctcaagtggtcctcctgcctcggcctcccaaagtgctgggattacaggcatgagctaccacacctggccacaacttcagtgattgctgcctcttcattcctgtgttctgtggaaatggcatggcttcctgggtgcagaattgtatcttttcctgggaaatattgacccagagcctgtcactgtgccctgtgatcagccctgactgctgctcttactaccctggtgtgttgttctggcatcagggagggtgtttgcttggcaccccctgtgcgctgtgccctctatgtgagtcttagtgtgtcatgtgccagcctccatggcccctgccctgcttttggtcctgcctttaggcccatttgcctgggctactactgctcaggtgctgctggaagcccagcattcctcatggaggtctgcagcctcctgagaatggggcgtgggcctgggctgctctcagagccacttcggtgcttctttccttcggccactcctggaggtggtaggccagtggccccagcactgcaatagagctacctaccctacttaaagcccactgcacaggcactgagtccccattttttgtcctttagaattgttttcctttctttttttcttttcttttgagatgttgtctcgctctgtcgcccaggctggagtgcagtggcacaatctcggctcactgcaacctctgcctcccaggttcaagcaattctcctgcctcagcctcctgagtagctggaattataggcatgcaccatcacgcccggctaagtttttgtctttttggtagagatggggttttgccctgttggccagggtggtcttgaactcctgacctcaggtgatccacccgcctatgtgctaccaccctggctaatttttgtatttttagtagagatggggtttcaccatatcggccaggctggtcttgaactcctgacctcaggtgatccaccctcctcagcctcccaaagtgctgagattacagccattaagccaccgctcctggccagaattgttttccctttcttacagatttcaaaatattgatttatatgatttttcttcttaaataaaataggcaaatttatataatggtattatgtgccaggcactgttcaaaggctttacaccttttaactaatttaaacctcatagtaattaagacacacatactattattatttccattgaacagatgaggaaactatggcacagagaggctaaatagttttcccagggtaggctgagctgatatttgaactcaggcagtccagccccaatccactgctttgcatctcatgttatgtggtcacatatagttagggagcagtccacaagaccctcacttctacaccaactgcaagtttgagggtctccctcaaaacacttttgggttttctaatttactagaaggactcatagaactcactgaaagctgttatactcattgttacaattacagcaaaagcatacagattaaaatcaaccaaggccctgtgcagtggctcacgcctgtaatcccagcactttgagaggccaaggcaggcggatcgcttgaggtcaggagtttgagaccagcctggacaacatggtgaaaccctgtctctactgaaaaaaaaaaaaaatacaaaaattagctgggcgtggtggtgtgtgcctgtagtcctagctactcaggaggctgaggcaggagaatcgcttgagcccaggagacggaggttgcagtgagccgagactgcgccactgcactccagcctgggcaacacagcaagactccatctcaaaataaattaattaattaattaagtaaaatcaacaaagagaagaggctcatgaagcagagtttaggagagttccacacatagaacttctgtcctctcctatggaagtcccaaacagtgctaaatcctcccagcagtaatgtgtgccaatacagacggagccttgccaaccaggaaagtgcacctaggccctggtgtccactttttattggtggttgatcatgtagaaaggcttgactgttcccaccactgacctcagtttccagcccttccaagaggttgagctgatgcctgtgacccaaagccctcattataaaccacatcattagactatctagtgtggcccaagaccactaggtaaacaaggacactcttaggacattccaagagtatagagattactttccaggagctgagggcaaaggccacacctctcttttggcaaggtcaaattctttaccacacagtcacttaaagacaggatcaccaggaccttcctaggctggtacccatgggtctccctcagtgactgtcctgctccttcacaacttatgctggcatctccagggctatcagctctttagagaacttttgttctctgtgcccataacccgaggcctgccaggcggtcaagacttcttcttttcagactattcctcctttggatctcctgctgaactcatcttctgctggcttcttaaatattagtgtcccttggagctctggcctgggcaccctgctctccccgtcttgcagaggaatctcacttttgtgctgatgctcagcattttagctccattcctgatcttgctcctgacacaaaacccacatgtccacgtggtccccaggcaggtccagcacaacagcctcctctttgttcctcatggtttcctcatctccaggtgtggcgccatcatcacccggttgccttcaagatacctgggtgttgccctgcccctaccctctttccctcccacaaccagttaaggtgcaggttctgctcttctttttgttttgttttgttgttttaatttttaaaaaatgtttgtgggtactagtaggtgtgtgtatttatgggcatatgttttggtacaggcatcatgcaatgtgaaattatcacaccatgcagaatggggtctgctcttctttacagcgttccatctttctctaacggttactgtcctgcttgtgaacatcacctttcacccaggttactatagggtctttcctctcacgtccctccaggtcacccaccacacttctctttccatccattgactttaaaactgcctgtgagtttacattgaaagtgcatctcttgtaggcagcatttttttttttaattcagtctgatgatctctgcctttttggaatgtttagtctgagacagagtctcattctatcacccagggtagagtacagtggcactatctgggctcactgaaacctctgcctcccagtttcaagcgattctcctgcctcagcctcctgcgtagctgggattacaggcacgcacaaccacacctggctaatttttgtatttttagtagaggtaggattttgccatgttagccaggctggtctcgaactcctgaccttaagtgatctgcctgcctcagcctcctgaagtgctgggattacagtggtgagccaccatgcctggcctggagtgttcagtttatgaaggggtgggttgcccctccacacctgtgggtgtttttcgttaggtggaacgagagacttaggaaagaaaaatacacaaagtatagagaaagaaataatggggcccagggtaccagtgttcagcatacggaggatcccgccagcctctgagttcccttagtatttattgatcattcttgggtgtttctcggtgagggggatgtggcagggtcataggataatagtggagagaaggtcagcagataaacacgtgaacaaaggtctctgcatcatagacaaggtaaataattaagtgctgtgctttagatatgcatacacataaacatctcaatgccttacagagcagtattgttgcccgcatgtcccacctccagccctaaggcggtttccccctatctcagtagatggaatatacaatcgggttttataccgagacattccattgcccagggacgggcaggagacagatgccttcctcttgtctcaactgcaaagaggcattccttcctcttatactaatcctcctcagcacagaccctttatgggtgtcgggctgggggatggtcaggtctttcccttcccacgaggccgtatttcagactatcacatggggagaaaccttggacaatacctggctttcctaggcagaggtccctgcggccttctgtagtgtgttgtgtctctgggtacttgagattagggagtggtgatgactcttaaggagcatgctgccttcaagcatctgtttaacaaagcacatcctgcacagcccttaatccatttaaccctgagttgacccagcacatgtttcagagagcacggggttgggggtggggttatagattaacagcatctcaaggcagaagaatttttcttagtacagaacgaaatggagtctcctatgtctacttctttctacgcagacacagtaacaatctgatctctcttttccccacaatttatattaaattacattacatataatctttattaaattacattattggtatggttggatttgtatctgtcattttagtgtctgttttctgtttatcccgtctactcttttgttcctctatttcttctttcctctcttttgttgtgctagtgtggatgaatggaacatttttcaaaattctgtttatttagatcaggcacacctcacattatgattttagtggttacttcagggatacaatatatatcttacttttcacagtttatttagagttatcattataccacttcacatagaatgcaagaagctcacctcatgccttctagaatatactttctgcatacacttcttcttggatggagtttccattgtcctaaagtccatcatttcttttttttgtttgtttttttttgtttgagtcagagtctcaccctgtcctccaggctggagtgcagtggcacaatctcagctcactgcaacctctgcctcctgggttctagagattctcctgcctcagccacctgagtagctaggactacaggcgcccgccaccacgcccagctaatttttctatttttagtagagacggggtttcaccatgttggccaggctggtctcgaatacctgagctcaggtgatccacccacctcggcctcccaaagtgctgggattacaggggtgagccactgtgcccggccctaaagtccatcatttcattgctggccgacctctgcatacttttctcttgttactaagtaacttgccacccctaaaatcaccgttttgccccccggcctttgttcccactgctcccctgcatagaatgcagttttccatcttcctgcggaggagagtcagctttccatatccctgggctctgaagcctaaccagaacctgaaaaatttaacagaccattcgcttctctgtatgccatagcctagatgtcctgccatcacagctcttgtgacatttttaccctgatggctttacatgttgctctctctgtgccagacagtgagctccttgaggtcaggacccatctatgactgtgaccccagcaacacacagtgggtcttcaatgtttgttgactcaaagtatggatggcaatggtagatagcttccaatgtgattttctttttccccaccatatataacacaaagccaagaatataaaaggccttccagatagataataagctctaacttataaacattataaaaatcagcaccatctcttgcacaaaattttttttttttttttttgagatggactcctgctctagcccaggctggagtgtagtggtgcgatctcggctcactgcaacctccgtctcttagattcaagtgattctcccacctcagcctcccaagtagctgagattacaagtgtgcaccaccatgcctggtgaatttttgtatttttagtatagacggggtttcaccatgtttgccaggctgatcttgaactcctgatcctcccaccttggcctcccaaagtgctgggattataggcatgagccaccatgcctggccctgcacaaacattttttttcgacatgactcaatgtcatttttgtttcaacagatacctgtgtcattcaaagatgtggttgtgggcttcacccaagaggagtggcaccggctgagtcctgctcagagggccctgtaccgggatgtgatgctggaaacctatagcaacctcgtctcagtgggtaagaacatcctcaccatacaatgcagattatgttcgaatgaccacctttcctttctcagttgctaaaagcaactggagtactttgggaggccaaggcaggtggatcacctgaggtcaggagtttgaaacctgcctggccagcatggtgaaaccctgaaaccccatctctactaaaaatacaaatattatccaggtgtggtggcgggcgcctgtaatcccagctactcaggaggctaaggcaggagaattgcttgaacccgggaggcagaggtttcagtgagccgatattgcaccattgcactctagcctgggcaacaagagcgaaactgtctcaaaaaataaaaaataaaaaaaaagcaacggaagtactctagaacttctgaaatatttatttaataattatctagcactttctatgtgccagaaattgttttagccactttaaaaatattaactcatttcattctcataaaagccttatgaggtagttactattagtaccacttttttacacatttggaaattgaggtacagagaggtgaagtaacttgcccagagtcacccagctagtagatagcagagtcaggatttgaacctcagcattctggcagcacagaatgcattcttaccttgtgctgctgcctcagtgggtgtggcttgagtttccatggtcctggattactaatcccatttggttctggacaaggtgtgtgtttagtcccctcccaagtataacatctattgtgcagcctttaaagctgcctgagaggccctgaagaccaaggagctcagcccaagacctgcatcaatttccccggaacaggttatgaaggcaccaaaccagatgtgatcctcagactggagcaggaagaagcaccatggattggtgaggcagcatgcccgggctgccactgttggggtaagtgtgataaatctagcaaaaggggtactgaaggaggctggcacctttggaattttgttcagcattcttctcttaaaagccttgaaagtcctccgagagcttcagccacgttaatgactcttcaacctccatgcaaccccaccgcccatatctgagtgtttttctcggctctacttgattgcacctctgcccttatgtgcttggtccatctctctttctccagaatctttcccatgcaggtattcttacaaataaaagcttctatgattctcctgttcctgcttcctattctctgttgtgacaaactttccagataaaatgcttcagagctacctgctttccctaatttctgcactcaaatttaaatcactcccatagacagatgactgtgggatcagagaagaggaagcagtgaattccatgttggggtggggaggtgtgaaggaaatggctgagctgggcccatcttaaccactgctgattaaccctcagactcactgcccctctcccttcagctctgtaagacattccagcaatatccattgtaccctgagggctgatggatggcccactcttagggatgcctctgaacttctgcttctggcgctctctggagtgtgttcctccattaaactgtgctcttcagctgtcctgagactgtggtatcccggttatcagttgccctcctcttcttttcttctcctcttctgaaaatttcgtaactgcaaattccacaagaatgtatctagtcagcctcccgtttttccagctactctgttactatctatttccctggctcaaacccagcattttccttccaaggaacaattgcattttctgttttccataacttggttctctttccagtggtgtaatcctctcaaagaactcacccattctgagagtacatgattctcacaaccagcccttttgccatgttgggcccttttttcccccttgcactgcccacccccgcatttaaccagtctgtggattacactacaggtgtgcacttaccctgttctttgtgtgtcaaaaactaaaatcatctttatttgtccttgctacccctgccacacacacactcacactcacacacacacacacacacgcacacacacacaccacttcatcttgcttattattccagggctttgctaccgtgtggtcattttgaatcttctgcctttaccactcactctaactgttccattcatatgtgtggttttgttgattttttttcttctgagaaatggctttaaatcttcctctctgctttttttttttctttttgagacagtgtctcactctgtcacccaggctggagtgcagtggcatgatcatggctcactgcagccttgacctcctgggctcaagcgatcctcccacctcttaacctcccgagtaactgggattatattcacgtgctaccacacctggctaattttcattttttttgtagagaaggggttttgcagtgccgctcaggctggtctcaaactcctgggctcaagcagtccacctgctttggcttcccaaagtgctggatttactggcatgagccaccatgcccagtccttctccacttttttttgttgttattgttcagatgaagtcttgttctgtcacccaggctggaatgcagtggtgccatctcagctcactgcaacctccgcctcctgggtttaagcaattctctgcctcagcctccggagtagctgggattacaggcacgtgccaccacccccagctaatttttgtatttttagtagagatggggtttcaccatcttggccaggctggtcttgatctcctgacctcgtgatccacccgccttagcctcccaaagtgctgggattactggcgtgagccactgcacccagccccacttttaattttccactgatatctcctaaaatgagacccagattatctcatgactgaatgtctttaagtgaggggttattaattatttttgtgccatggacttcttaggcattcttttgaaggctatagacctcacttctatgtataaaaatataataacgttcataagattataaaataaatgactaaagtacagtaattatcaaaataagctagaaaatagttatcaaaaaaaaatttttttttttttagatggagtttcactctgtcgcccaggccggagtgcaatggcatgatctcagctcactgcagcctcctcctcctgggttcaagcgattctcctgcctcagcctcccgagtagctgggactacaggtgtgtgccaccacgcccagcttattttctatttttagtagagactgggtttcatcatgttggtcaggctagtcttgaactcctgacgtcagatgatccacctgcctcggcctcccaaaatgctgggattacaggcgtgagccaccgcgcccagcttcaaaatattttcaaaatgtgcaatataatagtagatgtactttttcatttatacgttaatgaggcctagcatcaggtctaataactgtcatgatctcaaagaagagatgattataaacataataatgtgacatgaaaataacaatattcacaaactagtatcaagtcacaggaaccactaataccactgtgttttgttgcttatattcatattcaaaggaaatgttcaattgtagttggaactcagtgaaaacaaaaatgtaatttcttttctatcaaagttcacaagccccctgttttctgccaagttaagaactcttgcttaagtcctagttagctttgttgattttattttttaatctgtttcaccttagagtgctttaccgtttatattgtaactaactagcccaacatgatattcccttggatgactgctataccagtgcttgttaagctccaaggtgtttggaatcaccggggcatcttgttgaaatgcagagtctgattaagtaggtctggggcggtgccttagattctgcacatctaacaagctccaagtaaggccaaaattgccacttgaagacccacatgctggatagcaaggtactgtataacatttaaccttctttcttctgtaacagggatcagcaaactgtggcctaccgattggccacctgctttgtgaataaagttttattagaacacaaccacattcttacgtttacatgttgtctatattttcatggtatggcgggagagttgagtcattgtgacggagaccatatggcccacaaagcctttactttctgactccttaagaataagtttgccaacctctgctctgtaatatcctattttctttgaaattattggtctctatactctatgatatattgaattccatttgtgccagtgttcagaatcctctttactcatagaacactcttccctgcgtttgtgctttgggttatggttcatgttctctatttgtgtgctgtgcactctttaaattttgagagcatttcttaagtagtatgaagtttcataaggatgattcactgtactttctccagaagacatctggcgagttaatatccagaggaaaagacggcaagacatgcttttgaggccaggcgcagccataagcaagaaaacattgcccaaggagaaaagctgtgaatataataagtttgggaaaatatcacttctgagcactgatcttttttcttcaatccagagccctagtaactggaacccttgtggaaagaatttgaaccataatttagacttgattggttttaagagaaactgtgcaaaaaagcaagatgagtgttatgcttatgggaaattgcttcagcgtataaatcatggtagacgacctaatggagaaaagccccggggttgcagtcactgtgagaaagctttcacccagaacccggcacttatgtataaaccagcagtaagtgattctctcttgtacaaacggaagagggttccacctacagaaaaaccccacgtctgtagtgagtgtgggaaagccttctgctacaagtctgaattcattaggcatcagagaagtcacactggggagaagccttatggctgcactgactgtgggaaagccttttcacataagtcaaccctcatcaaacaccagagaattcacactggggtaagaccctttgaatgttttttttgtgggaaagcctttacccagaagtcacaccgcacagaacatcagagaacacacacaggagagagaccctttgtctgcagtgaatgcgggaaatcgtttggtgagaagtcatacctcaatgtacatcgaaaaatgcacacaggagaaagaccgtatcgttgcagagaatgtggaaaatccttcagccagaagtcatgcctcaataaacattggagaactcacacaggagagaagccctatgggtgcaatgaatgtgggaaagctttctaccagaagccaaacctcagcagacatcagaaaattcatgctcggaagaatgcctacaggaatgaaaacttaataattgtgggaaatacttgagcaaaatatctggtttcatggtatgtagggaattttttttttttttttttgagttggaatctcactttgtcacccaggctggagtgcagtggcgcgatctcggcttactgcaagctctgcctcccgggttcacgccattctcctgcctcagcctcccgagtagctgggactacaggtgcccaccaccatgcccggctaattttttttttgtatttttagtagagacggggtttcaccgtgttagccaggatggtctcgatctcctgaccttgtgatctgcccgccttgtcctcccaaagtgctgggattacaggcgtgagccaccgcgcctggccggtatgtagggaatttatccttaggagaaatcttatcattttaatgaatttgaacagtgtgtttttattttatttatttatttattttgagttgtattctctgtttcccaggctggagtgcaatggcactatctcggctcactgtaacctcagcctcccaggttcaagcagttctcctgcctcagcctcccaagtagctgggattacaggcacctgccaccacgcctggctaatttttgtatttttagtagagatggggtttcaccatgttggtcaggctggtctctttggctaggctggtctcgaactcctgacctcgtgataccccccaaccccccgcccttggcctcccaaagtgttgggattacaggcatgagccaacgcgcccaaccgacagtgttgtatcataatggaaatcatgatctaattgtgatacaaacttttctagaaaatactttctcaaacataagcatggacaccctggcatgtaaacgtttaaaaatgtattaaatggaataacagcagaatacaaaatatctgtgaagagacttaaaggcatactctggtatattccacagtgagccatacaatcagcattatttgtattttggagttgtaaatgtgaaattaacataaaatgtgaatatcagacacatgtcacacaacatatagaatgccattcagaaaacttttccactttaaatatcatcattgtcttttgatgtcttaacaatacaaaaaaataacaacaacatggcccactattgttaaaagaactttattataccagctacatttttccacctttttgtaatacatgtaaatggctatagaggttgttactgtcctctgcagaaataataaagcagtgtttttaaatgtatttggataatttggccaaaaattttactaaaatgtagttatttatattaaaaatgcaagctaaggaatagtttaagaacctgatactgggtaaatgaaacactgtaaactatttgacaaaatgtagtgtcaccctggtgtacagtacactgttcatattttcttagtcttgcttaaaatatcttgtagcaaattagtagcattgctacactattctagatacactattctatatacaggttgtataactcagaaatgtttcatgcgtagaccactgaaggagaatttcttttctctctatccctctgcaaattaattcaagaatattcatttttttcatataaatttccttgcaagtgtcctagacactaaatcccaaggttttaattatttcaatgtttggaaagaagtctgcttccctgagttgctatgtcatccatattagaaaataaatggccatgtggaatctacatttttcaagatttccctccatgtaagactgcctgatccagaatgagaaaggagacataaccacagatatcaatatgattttttaagtgataaaaagatacctcatacaactctaatcaacatattttttaaaaagaggaggtggatgcttttctaataaacttaagttatgaaaactgcaataagaagtagaaaacttggtaggatagttaacattgaaaaactcaaaaaagctattaaagatctataatgggaaaatgctccaggctcagaagagttcatgcttagttctatcttttaaagaaagagtaataccagtgttatttattatatggatgtaatacaatccatgaactgtactcatttattttattaagtcagaataaattttaacaccaaaatcaaatacagatagttgaaaaaagaaaacttctgctgggtgcggtggctcacgcctgtaatcccaacactttgggaggccgaggcaggtggatcatgaggtcagaagttcgagatggtgaaaccccatctctactaaaaatacaaaaattagccgggtgtggtggcacacacctgtagtcccagctacttgggaggttgaggcatgaggcaggagaattgcttgtacccaggaggtagaggttgcggtgagccaagatcgtgccatccagcctgggtgacaagagcgaaactccgtcaaaaaaaaaaaaaaaaaaagaaaacttcagaccagtcttactcatgaatatagaaacaaaaattatagttaaaatactagcaaatagaattcagccatatacccaaagagtgacatagtaagagtcatcccaagaatgccaaaccagttcagttaataggaaatgcatcaatcaaattaacagtttaaaggagaagaatcatatgaactctcaacagatactgagaaggcatttcatagaatgtgttaatttacattgtaatagatgggaaccacttaaagcggtttttcttaaaaaaaattttttttaacccaaaccccaaagcatatattatgccaaagccattttttaaaatcaggaattcaatattggcttagagattccagtgaaggcaataaaaagaaatgaattggtataaacagcagaaaaggtaaaactatccatttttactgatgatatggttgtacaccaataaatgaaaagactattttttgagttaacttttctaagaagacagggtaccaaaatcaagagctgttctccatactgacaagaaaacataatttatatgtacttcttttggaattacactaaatctcaatgattttttgacaatcattgaaaaaaatatatgaaaaaaatcataccatgtataaaaacatcacatgtacccaataaatatatacaacaattatatatctataataattaaaaatttttaaaatgccatgctagataccagaagataacatgaagccattctaatgaaattaatattgtattggcaaaggaacaggtaaatacatcattagaacacagtagaaaattcagaaatagacttcgatatatatgaactttttcatatgtgaaaaaggtgaaatctgaaaccacaggggaaaagagtagtttacttaaaaagaattctggaacagaaccttttaatcttaaaggaagaaaatttggattaacagcacaaaaataaattctgggtggctttaagacgtaaaattttaaagcaacagaattcttaaaagaaaatcaaaggagcctatgtgtacaatctaggagttgggagatattaactttaccaacacaggacactcagaagctatttagaaataagcagttgaaggctgggtgcagtggctcatgcctgtaatcccaacactttgggaggctgaggcaggaggatcacctgaggttaggagttcaagactagtctggtcaacatggtgaaaccccatctccactaaaaatacaaaaattagctgggtgtggtggcacatgcctgtagtcccagctacttgggaggctgaggcaggagaatcacttgaacctggaaggcaggggttgaagtgagctgagattgcaccactgcactccagcctgggcaacagagcaagactccatctcagaaaaaaagaaaaagaaaaaaaaaaggaaacaaacatttgactacgtagaatcttttggtacaatcttttgggtgacaaaagatgccatcagcaaactcaagagataatagattgtggggaaatatttgtaaagctgatcagagagaaggcattcatgaaatggacaggaaaaaaacccaatagcaaaatgtggcaaagaatatgagttgacagttgtgagaagagcaaatctaagtggccaatggacctgtccaaaaatgtttatcctcagtagtcactgggggatgcagatttaaagttaaaatcaaataacactgtgtaacagcatttttagctatcagaacaaaagatgttacacactgctggtggagaaataaattttgaaaaacaatgcaaattactgttttggaaagaaatctggtaatatttaggctgggcgtggtggctcacacctgtaatcctagcactttgggaggccgaggcaggcaaattgtctgaggtcgggagttcgagaacagcctggccagcatggtgaaaccccgtctctactaaaaatacaaaaattagctgggcatggtggcaggcacctgtgatcccagctactcgggaggctgaggcaggagaatcacttgaacccaggaggcagaggttgcagtgagccaagatcgcgccattgcactccaacctgggcaacagagcaaaaagattccatctcaaaagaaaagaaaagaaatctgttaatattattaaaatatttatgtcactttggagaatcttcccttagaagtaaaagctccaatacataaaagacagatgaacatgtgaacatggacatttattgtaaaaattgttcttaatggcaaaaaaacccccaaaaccaaagcaaacactagaatcaaagtaaatacccatcaactgggaaattgtagaaaggaaaaaactatagtgtatccattccatagaatgttaatatagccattaaggtggacaaattaaaactatgctagtggacttgagtggaattccacaatgttctcttgagtgaaaaatgcaaggtagatattaagtatgttaaatatgactccatttttttaaatcattaacaaaatgtctctaggtgtttgtcagcaataaacggtatctatatatgtttatttgattttatgtgcatgaagaaaagtatagaagagtatgcattgacttggagggaggtgggtaatgcaggtaggttatgggggagtcaggggtgtagggaaaaggaaaaccaaaaaagaaaaatacataaatgactgaatcacgggtgataccacaaatgtgtgagttagtaaatttggctggggatgggggagctagaattttgctaatttgtggggatgttcatggtatatattgtaaaaagggaaaatttcataataatgtatacgattctatttttaaaaaaagtaaaaactcctgtgtgtgtatatatgcatgtggatgtttatatgaacatagaaaagtgtagaagaatacacacgaaggtgttaacattcattggttaccttggtggagaagggtaataagttttctgaatacctttgcattgtcttgttcacatatattgcttttgtaatttgaaaaacaaaataaagggggaaaacatttcaaactgaatgaagccttgaaaatgtttccattttctgacaagatggcaccctgacttggtctagggttgaggttagggttatggaaatgacgtcttgtcacctttgctgcattctactagaaacaagtcataggtcccagccatactcaaagagaaggaattatacatgagagtaatttccttctccagactaccaggcagcagagatcattgggggccatcttggagtctacccacctcatcagcgaaacacttatttgaaactagggaggagtgaggatggcaactgtgttggaacagtagtttaagtaagccacatacttgctgctgggcaccatgagtgcacagattctagatgtgcttgctggaagttctccactaaacagaagtattcatttatccacaagtatatactgagtgcttactatgaactggacactgttctaggatctggggataaagcagtaaacagaaagaaatgttgataattgtcaagaagcaaaatgaaataggaggggagttaaattttagatgcagtaaccaggaaagccctcaaaatgatctctgcattaagacctaaagggaatgagagatgtaataatgcaactgtctagaaaattgtattctaggcagagggaacagcaaatgcaaaaatgcaaacaccctaagggaatgtgtctggagtgttggagaccagaaaggaaggtgtattcttgttgaataacaaattgtcccccaaacttagtgacctaaaacaacaataaacgtctcacatgctgtctatgggtcaggaattttgaaagtgccattggattcacactccccttagctgtgcttcttccctctcactctgcccttccgaagtctttgtccaagctatctctctttccagaccagcacacaggagggccagtgccatttgcgcttatgggaaggaaggagtcccctctgccatggcctttctgtgttcctccacccagcagtggaatcgaagctgttcagcaccttctccaaaatattggcgcccaatataccctaccattcaccaatgagagcaggttgcagaccactactgtctttctccgtctttcttttcctttttttttttttttttgagacggagtctcactctgtcgcccaggctggagtgcagtggcatgagcttggctcactgcaacctctacctcccgggtttcagcgattctcctgcctcggcctcccaacatgctgggattacaggcgtgagccaccacgcctggctaatttttgtatttttagtagagacggggtttcaccatgttggtcaggctggtcttgaactcctgacctcaagcaattcacccacctcggcctcccaaagtgctggaattagaggcgtgagcccccacgcccggcctactgtttttcttatgactagcactatattgatggagaggagatgcgggcagtggtttcctgcagaagtgacagcctcagagtggggttccaacagaaaggatggtagcaggtcattgtcaactgtgtatccctacctagaacaaccaaaaccttggggtcagaaaaagataggctgggggtattgtaggacacatctttgaaaatggtcgtccccagggagaaacagctaaatgggtgcagctacctggtttcaccgcatagacgcaattaattactcagcatctcacactataatggggcgccctgggcatttagctacacagcggaaagccacacctgagtgtgtgtggcagccttggggcgaggtggagagggttgttgcagtggccctgccgccacagaaggagagatgtcctttgaggaaaccatggcaatgtgtggtcttgcggagagatggggcttaggaattggatgcaattgactgaaaatgggaagtgggtggcaggaatggggtttaggaattgggggaggagaatcagttctgggatgtagtgataaagaggtccaaggaatgattgcatgcagatacttggttttcaatgattcaggagtccagagaaggctataattggtatgggtgtcccagtgggtcaggtatccgaggtcttggaatttgggagagtggtagtctctgggatatgggatgtggggagtctaaggagtcaataagggatctaaagggttggtgataggtgacttctttattgtggtaaaatacataaataatacaatttaccatttaaatcactttaaagtgtataattcagtgacattattacacttacggtgttgtgcaaccatcactacaatctagttccagaaatttttcatcaccccaaaaagaaaccctgtatccattaagcagtcacttcccattcttcccaccccttccttccccaaactcctggcatccactaatctgctgtctctagtctctaatgatttacctattctggatatttcatataaatagaattacacagtatatagcgtattaacaaactgtcctcaaagttccttcatgttgtaacatgcctcagtacttcattcctttttatgactgaataatattccattgcatgggtaataccatcagttggtggacatttgagttgcttccaatgagaggattatctgagtattgtgaaatgtactgctatgaacattcttgtacaagtttatgtttaaacaccttattcaattattttgggcatatacctagaagtgaaattgctggattatatggtaattctatgattaacttatgaagaaataaccaaactgtgttttttttttacagtggctgtacctttttatattacaaccagtaatgcacaagggttccagtttcttcacaacctcgccatccatcatttgttataatcatgtgccacataatgatgttttggtcaatgagggaccacatatacagtagtggtcccataagattatagcagagctgaaaattttctttttataaaattgtatttattattattattttttttccaacttttatggagctgaaaagtttatactgcctaatgacattttgatgatcctggcactgtgtgtacctaggctaatgtgtttgtgtcttagtttttaacaaaaaagtctggaggctgaggcaagagaattgcttgatctgccctattaattgcaattttcacagttaactagtactatttttatttaaataatattacctgggaagcggaggttgcagtgagttaagatcacgccactgcactccagcctgggcgagagagtgagactctgtctcaaaataaaataaaattaaattaaaataaaaaaattaaaaaaatttttaagtagaagattatagaataaggatataaagaaaatatttgtgtacagctatacaatgtgtttgaagctaatttattacaagagagtcaaaacatttttaaaaattaaaaggtttataaagaaattatagtaagctaaggttaatttattaccgacaaaaaaattcaaataaatttagtgtagcctaagcatacagtacatataaagtctacagtagtatacagtactgccctagccttcacattcactcaccgctcagtcactgactcacccggagtaacttccagtcttgcaagctccatccacggtaagtgctgtataccggtatacgatttcttatcttttataccatatttttactgtaccctttctatgtttagacatgtttagatacacaaataccattgagtataattgtttacagtatccaggcaatttggatttgtagcctcgaagtgataggctgtaccatcaggctacatcatctaggtttgtgtatgtacactctataatgttcacataatgatgaagtcacctaaccatgcattactcagaaagtatccacagaattacacaatgcatgaccatatttacattctgctttttaaaaatcttaaattaggctggatgtggtggctcacgcctgtgatcccaacactttgagacaccaaggcaggcagatcacttgagcccaggagtttgagaccagcctgggcaacatcgcaaaaccccatcccaacaaaaaaatacaagaaattagctgggtgtggtgatgcacacctgtggtcccagatactcaggagtctgaggcaggaggattatctgagcctggagaggtggagtctgcagtgaaccataattgcaccacagcactccagactgtgtgacagaatgagaccctgtctcgaaaaaaatcttaaatttatgtatcttaagaatatacattaatatagagtttaaatatcaaataaagagggttttttaaagttgaaacaatgtatcagaggataaaaaaccataaaacatttgtttaaatttaaaggatttgtttaatctgccctattaattgcaattttcacagttaactagtactattttttatttaaataatagtatgtatgtaacagaatagtaaagatgtaacctgtggatgctgttttacagcagcagaaactggaacacatgcagtctcatgattgtcctactcttttgccagatcattgcattgtctgcccaggcacccctcatcccatctctctccatcccttttcttaccttttcatgttccttgtcttttcatgacagcatttatcaatgtctgaaagtagaatgttgttgattgactctctcttcaactagaacataagcaatgagcggcccagcctttgtcccacacactgcagtgtgtcccacttctaagaaagtgtccaacacacagcaggaactcagtcagcatttcttgaatgaattaagtgaagtgatgcatacaggccacattctgagctgctggaggagccagtagttgattaccaaactctagtcctttatcttggtgtcctgatgtcctgactgatacacagtttgtaggcaaatagctggtggggtttagtagtatgggatagaataaagggagatgtaattgggacactctccacattatctgcccccatgaaaagctagttccaggtgttgccatctctgccccacactgggcttgccttagtcctcgttcccgccttttccagacagcagtgctgagaagcaggagcccctgagcttggagacgcaggaagagccctgggaggcccagatcaaagggaggcagtcagctcatggagccgaggaatgttctgctgacacccaccccgagggtatccggtatgtttctgtgcaccagcgacccctccacacctcaccagattggttccccagccccgtgggacccaattccgggtcaattccaatttgattccagtccagaatcaaatcagaagagcaatcccgagtgcccacctcacggtctgaagcacctcctcctacacccggacccaaacacgaggtcggctcaaggaggcactgaggtcacgacagtcagggtcctgcgctgcttgtcgcatgcagtctccttccccgaaccgccgcctgcacggcctccactgttttcctattgggctgcagcctgagagccctgacaatgcggcccacaaaccgggaacgcgaaagtgcacgtaccaggcgcgatcaccaggcgctagcgctgaggggggactcgcgtcacagtaaccgccaccgttgccgggggactggccccagcggcttggcccccaggcgtctgtggcagtgcgtcccctctccgcgggatcgtcgccatggtcctgcgatcctaggagtcgggcaaggccgaacctgcctgaagaaacctcaagcggagattcaaggaagcaccacgtgatccctaaggatcccaaagatgcgtcgggcatgcatgggcggtgtgagggtgcgtctccctgacaggtgtccccgctgggatttcgaggtacggcctgcctgtgttccccggggcgctctctttccggaggggtttcctggcagagagcagaaccgcgcagcctcaggagctgcctggctgtgtgtgtttctgtgcgactgttggatgtttccgtgtgtctttctgtgtgtgcgtgtgagtgtgtgtgtggtgtgcggtgaaagaaatgtggctcgtgcagtgaagcgcggtttctctgtagttcgcctacgctctgatgcgcccgtctctttggccgggcttgggttgcggggcaagcgttctttgtttcgctcttggttcctaaagcctcggtgaagtggggggctggctgcgacccgcaaacgtccaaatcacctcccctcccaagccgcccactcttccagaaagaagaccagcacacgacaaccaagaacaaattcctccaggggcccatggtcctgcggcacacccaaggctggacggaccctagctgtcctgtcctcagtacccccttgagcccacttctaattcggtggctggcggagtcgcagcttcaggacctgaggcgggcactccttcatcctcttcagatttcattctggattaaaggatgtgtgcagaaaaaaggtcagatgggggtgaagatacaatccgctgaggtgtggaggaggtctcgcaccttcacctgcagaacaggtgcagacagatgtcaaagaaactgtttccaacgccatccccttttcctcttcactgtacaacctgtccacaccatggcgctgtgctggcgatagaagacacgagtgttcggagaacctttggaccgaagactgtcgcctttctggccaggtcccctgttggaccctggttccccgaggcacatgggagtgggatggattgatcctgcctgggctgcggcctctactctgttctccctcttttcttgccttccctgattctcgtcggcccaggttttccttggtctggctcacagtcctccagaacgtccttcacagcaaatgtttcccagttcgtccaggaccaccttggcggggacgtaggtgatgagtgtttccttctcaacactcacatttcttaatgactgggtagctgtgatgctcttggaaccgtgggtgcccgtagctttccccaataaggaaactcttggtctccccattgcatcagatggctgcatgattcacatagaatgagaggtagccagccgtagctggcctttgccttctaatgaaggctatgtttcatctcatctgctggtgttttctcattgttgaggggtctcccattgctctgttcctggctgggactgcctctcagcactgcaccttttcgttgccagggatttcacggagcaaaagggactgggggttagctgggtgtagacccggtggtgggttgtgatcccggtgtgggtgctggatcactttgcaggatcctcttggctcctctggcaggaatccctggaggaggcttggactccggcacaggccctcctatggtttcaggtgtgctttgcttgtgcttcgctttcttgggggtatcctcagtggccctcgccagcatgcctggatatcccttttgggcttggattcaccccagaaggcctctgagacactctctccacattttctgcccccatgggatgccagttttaggtgttgccacctctgcttcacatcgggcttgactttgtccttgttcccgccttttctggacagcaatgctgagaagccgaaggccctggtcttggagaccaggacagggccctgggaggcccaggtcgaaagggggccagtcagctcatggggcgagggaatgtcctgctcacaccctccactggggtctcaggtatgttttcctaccccagcgacccctcaactcctcaccagattggatccccagccccatgggacctgattcctgcccacaccctccaatctagaatcaaatcagagagcagtcccgagtgcccacctcaaggtctgaagcgcctcctcctccacccagacccgtacacgaagtgggctgaaggaggcactgaggtcaggactgtcagggtcctgcgctgctggtctcacgcagccttcttccccgggccgcagccagcacggcctccaccgttttcctatgggccctgagagccctgacgttgcggcagcgccagccgggcacgcgaatgcgcatgcgccaggcgcgcgtcaccaggcgcgacggctgagccggggctcgcgtcacagtgacagccaccgttgcctggggacgggccctagcggcttggcggagctggagccctccctggcagtgcgtcggcgctgggctatggccccctcctctccgggggatcgtcgccttggtcccccgaccctaggagtcgggcagggcagaaccaggctaaagaaacgtccagcgtagcttcaaggatgcaccgcgtgatccctatcggatctccccgacgcgtcaggcctgcctagacggtgctgggagcgcgtctccttgaacgttgtcccgcctgggattgcgaggtaggtaccgcctgcctgtgtgtaccggggctgctgtctccggggaggggcttctggcggacaggagaaccaagcagcctcaggagctgcctgggtgtgtgtgtttctgtgcgagtgttgcatatctctgtgtgtgtttctgtgcaagtgttgcatgtctgtgtgtgtggggggggtggtgtctggtgaaaagaatgtgtctcgtgcggtggagcgccgtttctctgtagtccgcgggctctcttatgcgccctcttgtggtcccaagtgtgcttttcttgtttttcgctttcttgggggtcattgatttcagctctaagcttaattccttttctgagtctcacctgtttctttaagtgggaacttaaaccattgatatgtatttaaaagcatacatttccctcaaagtgctgctttagttgcattccacaaaattttatatgctgttatttttgactccaaataggtaattttttacttgtcccatagtttacttaaatgtgtgttgcttaatttgcaaacattttttaattttgacattaatttctggcttaattctactgtggttagaaaacagattttctgatttcaatccttttcaatatattgacaatttatggctcagaatataaacaagcttgctaaagttctttgtataagtgaaaacactgctgctgctcttaggtggactagtctataagtatcaattacaacaagttggctattagcaccgttcaggtatcttatatctttatagattttctatatacttttaaaagttaatgagagaacagtattaaaatctcaaaatatgattctgagttcatttatttttatttctagcagtttttaatgtattgtttagttctggtactaggcacaagtacttgtatgattgctttgtcttcttggtcaatacacttctatagtattataaaatatgcctttttagaataaatccctggtaatattctttgtttcaaagacaatttgttgtgagggccgggtgcagtgggtcatgcctgtaatcctagcactctggaaggctgaggtggtgggatcacttggagtcaggagtttgagaccagcttggccaacatggtgaaaccccatctctaccaaaaatacaaaattagccgagtgtggtggcgtgcgcctgtagtcccagctactcgggagggtgaggcaggacaatgacttgaactcgggaggtagaggttgcagtgagccaagatggcaccactgcactccagcctgggtgacggggtgagactctgtctcgaacaaaaaaagacaatttgttttatgttcacatagccattttggtatagtgtttgcatggtgttttttttttttttttaacttttaacctatttgagttggtatatacttttgactttttaatccgagtcttcatattttaatctttttttatataacctaacatcttttttttttttttttttttttttttttttttttttttggagacagtctcgcctttgtcacctaggctggagtggagtggcatgatctcggctcactgcaacctccacctcctgggttcaagcgattctcctgcctcagcctcctgagtagctgggttacaggtgcccaccaccacgcctgcctaatttttgtatttttagtagagatggggtttcaccatgttggccaggctggtctcaaactcctgacttcaggtgatccgcccaccttggcctcccaaagtgctggcattacaggcatcagccaccacgcctggctttcttctgtgtttttttactgaagtatttaggccattaacattgtttgtaattattgatatatttgggtttgtaacaatcatcttgctctttattctgtttctcttatctatccttaattctttttctaattttctgcctatttttgtattttttaaattatattctattttacttctactactggctaaatattacggcactttttagaattttgagtgctttttttcctagaggctttcaacattcatttttagctttcaatgtctagttttacatattataccctatcgtatatttgctgggatctcacacaaataatacttccattccaccttctcacctttgagccattttcatattttaattgccacaaatattaccatccctatactacattattgattttgcattaaaaactcaattactttttcaagagaatatgaggaaaacaatatttactcatatttaacttttctgttaatttccattcgtatgtatgaatccatgtttccatctgcatttgttggtgatgaattctcttaccattcatttcttttttcatttgaaactattattttagggtcagggagtacacatgcaggtttgttacattggcaaactgcatatccctggggtttggtgtacaaatgattttgccacccacatagtgagcatagtagctgacagttttttgaccttcacattccttccaccctccactctcaagcaggccctggtgtttattgttcccatctttgtgtccatgtgtactcaatgtttagcttctacttataagtgagaacataacagtatttgggtttctgatcctgcatgccttcacttaacggcctccagctgtgcccatgttgctgcaaagaacacaatttcttttttccctgaggctttagctttcatttgtttataaaagttttcacttttttcatattattaccaagtgcagaaataccagatagagtttcctccctattcctttctctgctagcttgcatagattctcacaaggagtttatgaatcttgttacttttgtccccatgtatgtatcttttttccatcaggctgttctcaagattttcctttaccactagttttcagcaatttgtcttgtgtttagctttgagttccttgagcttcttagatctgtggctgataggttccaaaaaatttggagtattttcaaccattatttttaaatattttttctgccttctccccgcttctcagactcacatttacatatatctttatattttcccacagatcaccaagactcttttacagtgtttttcccttgttgtacctgagttagagaaaacgccacactttgagacgaattaagagtccatttattagctggcgaccgagagacggctaacgctcaaaattctctcggcccgaagaaggggctagattttcttttatactttggtttagaaaggggaggggagggtctagttaaaacaattttacagaaataaagtaggcaaaaagttaaaaggataaatggttacaggaaattaaacagttccaggtgcaggggctttaagactattacaaggtgatagaccgggggctttgggcgttatcaatcagatgaattcctgggaattgcagatatagcttgccacagtatcttatcagttaattgcattcttggatgtgctgggagtcagcttgcacaagttaagtccttgaggaagcggctgccagtgaaagagccaagatggagtctgtctggctctcttagctaagggagagtcaattcaggtggaaacaaggctgggtaattaaaggaaaagggagagtctaaaaacagggttagtaaaaacaaggttgggcattacattccccacttgtgtttttggggaatcaaatcgttgattcctcaattataacaagggggttatattgagtattaagatacataagtttgacagaagctatgcattcttttacaaaattaagaaaccaattttatatacaaggcccaaaaattaaacttaatagtatgatgaggagaggtccagctaacccagtgattaaagtagttagccaggggttccagttgaacatgctttgataccaggggatgttgttttctcgttcctgttggcgcctatctagattttctcgaacttttggagtgtatcttttatgactaagaatggtggaggaacagttaaatcaactttgttagggggtttctggaacatagggtcacctagatcagttaaaggcccgattggcttgggtgggctccatgagaccaggattttttggatggtgaacatagtcccaacatcaaatcctgggatataaaatcttaattcccatgacatgccataatactactgagttgaattagggtcatggacagttatagtaagaggattacaattttttctagtacataatttaggacgagaagcacgagttatggaatgaagatctggttgatcccccagagtaggtggctaaagttacacatgtccaatcagggcagaaaaactggtaagtatctcgacagctagtgtcagggtgattcccaggacagaggtaaaagtcaacattttggagtcctttttctgcacctttggagcttccacatccagtttggctcctggagtgtccaaatcctgctgcaaggttgacacttcctgcttttgggaccggcagattgtgttgctcttcgcgggtacgggctggctctgggaacagtacacataaatcaactgcaaaggagacttccttggaggtactggccctccaagtggtgtttgcaaatacacatcctgttgtgaaagaggtgaggagaaaggagtaggaaggcgcaaaggacataacaggcaaaaacaaacaagtgaggtagataaaaagaattaatctaatggcttcacctgacttaggtgcagttttaaaggggcctgacccaggcctggggacccatgtttctagttgggctctgttggcctttttgatgcgggagtgatgaatctaagcaggaatgccgtccaccttcagagccattggcgttgtgaggatgatggtgtgaggtcttttctaagcaggagtgagtgcttctttctggaactttttaacaaacactaggtctcctggctggaacgaatggcaggaccctgtctggtcaggaattggattcggatgggttccttgaacaagtggcaggatgatatcttgtacctgttggggagactgtaggtactgtaataaattcttttgtgatatttctgccaattgggcatctcttagcttaggcaagataggcggcgccctcccatacatgatttcaaaaggtgagaacctagcctagtaaggggtgcaccttactctaagtagggctaaaggaaggagacttacccaatttacacaagtttctaagattaattttgtaagagtgttttttagggtgtggttcatgcgttctacctgcccagagctctgggctcgataggcacaatggagcttctattgaatgtttaacgccttactgaccgacagaactatagacgaggtgaaggccggtccattatcagaccctatggcagcaggcagcccatatcgagggatgatttcattgagtaaaaacttaactaccaagttggcggtttcgtttttggtagcaaatgcctcagtccatccagagaaggtgtctactagtactagaaggtatttgtacccagcctggtgtggttttacttttgtaaagtcaatttcccacttctctcctggcaagtttcttcggagacggtggcctgggctgggtttaggaccttgtttggcatttacctggtcgcaggttgttccccagagagctgcttgatctgttaggctttgaagacgggggattcttgtttttgatagccttttctgctgaggtgagtagcctgcgctcctggcagatggctccatgtacatgcaccgtagcaaaggcgtacctgctgtcagtgttaacgttaatatccttaccccatcggagagcctgagtgagggcgatcaattcagctttttgcgctgaggtgtttgctggtaaagcctgagcccacaacacatctgtctccgtggtaacagctgcaccggcctttcgtactccctgctcgagaaagctgctaccgtctgtgaacacggtggcgtccgccttctctaggggcacatcttgaagatcggatgggccagtttcggtagtttccaacagttcctgacagtcatggatagtagctggatttaaacaccgtgtggaagagaaagtcagtttactgatctaacagtaaactctgatattgcaagatgcgagcatttgacatccattcgccagaagcactttgaagtaaagtctctatggcatgaggagccttaagggttaaattttggcccagagttaacttatcagcctcttggactaggcttgctgtagcggctactgcttggctcgcagacaacttggccatccagaggtctcaggatccagtttcttagataaataggctactgggcgtctccagggtcctaaggtctgagtaagcacccctttagcaactccctggctttcatggacaaacaggtgaaacggctttgagatattagggagggctaaagcaggggcttcagttaatgcctttttcaggtttcaaaaagcctgttcttgtgtgtctgtccaaattaacgggccatttcattctgtacctcttggatagccgccactaagatttttgtttgtcatttgaatgctttatcagcagccttttcagctgcctgtgttgctcgtttttgtttttcaaactcttggttgtcaaaaaccttttgggctatttctaaaagctgactgatattcattccagcaaatccctccagtttttggagttttcttttaatatctggggctgcctgagccacaaatgccaaattaagagcatggctattttcgggggccgctgggtcaaaaggggtgtaaatctgataagcctcctggaggtgctctaaaaacggtcctggtgactcatcatgcccctggatgacttcattcgccttagacaagtttatgggtttccgagcagctcccttaatacctgcgaggagataccggtggaaatcatccaaagctctccctccacttgaggaatttgggtcccaattaggccgggtagagagaaagacctctgtgcacatttctgaaaatcttttctgtatatctccttcctctctggaactctgtcctgcaccagccagcatgtctctgttatcttcttaacacagtaagaacttcatgttgtttgggatcagctttctcattatccagaatgtgtctccaagtagaaagtttgtgtgactattgcacaacttcactatatatatatatatggagagagagacagagagagagagagagacagagagagagtgtttcactctgtcacccaggctgtaatgcagtggcatgatcacagctcactgcaatcttgacctccctaaattcaggtgatcctcccacctgtctcccaagtagttgagaatacaggcatgcaccaccacacctggctaacttttgtattgtttatagaaatgggttttcactaacttgccaaggctggtctcaaactcctgcgctccagtgattgccttggcctcccaatatgcgaggaatacaggcatgagccaccacacctggcccacatgattctcttctgtcagggatcacagtcatacaaaccaattattccatcatggctccaacagaagctcatgttttttgacactggtgatgtcactggaaagaaacactctcacacattattggtgagaatgtaaattgacattttcaaaagtaattgggcatgatctattaaaatttaaaatgcacaaatacttttgacttggcagtataatcagttgtaatatattctatataaataaaatccaagaataaacatataaagatatttattgcactagtttgcagaaatagaaaactcaacctgaatactcagcttatggggaatggatagagtatatcatggcattgctgttactaggttgctacatgtaattctgcaggcattttgaaaaagaaaagcaaggtgcacaagacaaataccaacaaaatataatgtacagaccttatttaaatctggactcaaaccaactattattgtgaaaggttgacttatctgttcaagatacatactgaaaatatttagggggaaaaggtatatagcatgctggttgtctttaatatatcccagtgaaaacttattgggagagaaaacaagaaaggcaaaaatagggtgattattaaagaggttatgggtacactgtactattttatttttgcccatgtttaaaattttctaaagttaaaacaaattaaagtgacagatatatttgcagttatcctattatagtatactgtcaccagactgaaatgacacccacacttgagcacagaagaaaacatcaaaaaataaacacgaaagttttaacagcagatgagtgcaatacaatgaaggtggtttttaaaaatttttttagctgggcgtggtggctcacacctgtaatcccagcactttgggaggccaaggcgagtggatcacttgaggccaggagtttgagaccagcctggccaacatggcaaaacctcatctctaccaaaaaatataaaaattagctgggcatggtggcaggcgcctgtaataccagctactcaggaggctgaggcaggagaattgcttaaacccgggaggcagagattgcagtgagctgagattgcgccactgcactccagcctgggtgacagaatgaggctctgtctcaaaacgaaaaaaataaaaatataaataaaaataaattttacactatttccttggtataggataaacttcgtatgtaactttgtaagataaatgtaatgattttttttttttttaggatagagacttgctctgttgcccaggctggagtgcagtgacacgacttggctcactgcaacctctgcctcctgggttcaagcaattctcctgcctcagcctcccgagtagctgagattacaggcatgtgccaccacacctggctaattttgtatttttagtggagacggggttccaccatatcggccaggctggtcttgaattcctgacctcatgatccaccagcctcagcctcccaaagtgctgggattacaggcgtgaatgtaatgatttttaaaaagaaaaacatggatgtaaagaaagtaaagcttcgttttgaacagttatgatggtaacaaaactcaaaggagcaactaaagcagtgctgcaaccacttttgtctgtcttagtaattctgattagtgtacattcctcccccaccaaccattttgagagaaatttgtctgaaaacatgatttatgaaataaacataagtgctgaaagagttaacagttattaagtttcttcttttaaacaatcttgtaacaacagaaaaagccttggtcaggtatggctcatgtctgtaatcgcagtactttaggaggccaaggcaggaggatcacttgaagcccgggatttgagaccagcctgggcaacaaaataagaccctgtctctacaaaaaaaaaaaaaaaaaaaaaaaaaagaaagaaaaaatttaaattatccaggtgtggtggtgcacacctatagtcccagctacttggaaggttgaagcaggaggatcacttgagcccaggagtttgatgctgcaatgagccatgccactgcactccagcctgggtgacagagagcccacctctaaacaaaaaaagacaaaacccttataaaattgatctagacaatgatggagtgtagaggattgtaaaaaccttggctacagaaattgttcctctctagtgtagtccatgactgaagaacagaaaagcactatatcatccatcaaatttaaataactgacataatgcttaaaatttccccttaccatcattctttatggttaaaaagaaattctgcaagtgtgttcacaagccaaagatattaataagcatacagaagagaaaggattaatggtcaggactgggaaacaatgggttaaacaaaagatagtattttctttactgcaggtcttctcaaccttttaatttggtttgttcagagtggaattcacaatgccagtaaggaaatttggttatgcactgtatcatatgcaatgaggtagaacccgctctacgtattttgggaattatttcttgaacatatttttgaaaagtctggctcaagatattgtctgcaaatggcagttaatatgcaagtatgtttgatggtagaagggcacctaacagtctactgacatttaacttttcctttaaatttataattttgcaattatgttaatctctcaattgttaatgactgaataatgaaggcataacttatccaatctgaacaaaatgtactttagagacgaagaatgcatgagtgttgtggcatcatggtggttacactgattattcagagttctaatgattctcagttaccacttttttttggacaatagtttgtaaaacagtgaattaacatttagattataatcatacactatatacaatcagtggtttccagagtgatgacaattcagtgggctgcaatgttcattaaagataatgtaggccgggtgcggtggctcatgcctataatcccagcacttcaggaggctgaggcagacagatcacctgaggtcaggagtttgagagcagcctgaccaacatggagaaaccctgcctctactaaaaacacaaaattagccaggcatggtggcacgcacctgtaatcccagctacgtgggaggctgaggctggggaattacttgaacccaggggtggaggttgcaatgagccaagatcacaccactgcactccagcctgagcaacaagagcgaaactccgttttttttttgtttgaaaccaaaaaagataatgtattagaagacaagagataacactgcatatagaaaaggtaagtatttcttggtaacatttgtttttctatgaacagctttgtatacagtaactcaattttgaggtcttgagttctgtgcaccagatgcttggaatcatagaagaactgtaggcattgattgattgctgctccaatatattattctaactcaccttcactcactgaacaccattaacctcttctcaccatcattaatttctgaccatcagccctcattcaacaacattctaattaacaagttcaaattatttaaagctgtttttatctgtcatttgcgtccattatgtactaatgtattacatttattgtcactatagtatctgttccttaaagcatagaaggaaagcataattcatgtattatatttttcaaaatcactgcatgcacaaacatatctggtaattaactgttaactggcttttgagtgttttacattattcagaaatccctgatagaggtcatttaggtggcttaaattaagttgaattcaaattaaatttggttaggattttttaatggactgaaaacatactgtttttcctatttaaaataatggggccaaataaaaataatacaaaccaaaaataaaataatggggccagatgtggtggctcacatttgtaatcccagcacttctggaggctgaggcaggtagatgcttgagcctagaagtttaagaccagatgaggaaacatagtgagaccccatctctaaaaaaatttttttttaaatgagctaggcatggtgatgaacagctatggtgacagctacttggcaggctgaggttggaggatagcttgagcctaggaggtcaaggctgcagtgagctgtgattgtgccactgtactccagcctgaacaaggagagcaagaccctgtctcaaaaaaaaagaaaaaaaagacaaaaagaccaaaaaatggaatgtagcctccgagatctgggtctctaaaaatttaccattcagtatatcagaaatgggttagattcaaatgaggaaaaactgtagttggtaaattttgtttatatttccatttaaggcaaatatatattttatacacacacacatatacatatggaatatatatatggaatacatatgtggaatatatacatatatggtatatggaatatatacatatatggaatacatatatgcatacatacatggaatgtatacatatgtggaatatatacacacgtggaatgtatacatatggggactatatacacacgtggaatgtatacatatgtggaatatatacatgtggaatacatacacgtggaatatatacacatgtggaatatattccacatacacacatgtggaatatatgtatatattccacatacacacatgtggaatatatgtatatattccacatacacacatgtggaatatatgtatatatatggaactaccttggccatcattttgttaagaaattctttttcccttaaagtaacaatcagaaaatgtgggccaaaaacttttgcttttggaatttgttgtagaaaaataatctttcactttcttaaaaaacaaaacaacaaaaaacaacagccctaaagcaatttttggaagtttcttcctggtgtggattatctgatgctcagaagtccttcatacctttactatactttaaaggttttgtctaaaataaagtatctgttgttctaaaggggctacatgataagagaatggttgcatctttttactgtaatcataaaatattcccaccatttgagttctctaacagtatgtaatgatgataatggcaatcattttaacaacaaatatcagatgctatcgaaagggaattatatgtatttaattataatttagtcattgtaatacaattacagtattttacaaatagaaaagaacacacaagaaatatataggatttcagttaggatatggtgaaatggagatgatgcttaataaaggatataattcagcattatattctagcgtttatagagatgttaaggaattatttaaggggtttctgaaattattctgcatccatgttaatgtaggccttctaagaatgagcagattctgagcagaagcaagatgttctacattcattatagatatgaaatagatgaagattttcttaaatttaatcacattcaaggctttctcaattatgaagccttgtatgttgagtaagttgtgaaggacatctaaagtctttaccacactggacacatgtatagggtttctcaccagtatggatcctttgatgcagagtaagttctgagccacgactaaaggccctcccacattccttacattcatagggtttctctccagtatgagttctcagatgttcagtaaggtgtgagccacgaataaaagccttcccacactgtttacattcataaggtttttcacctctgtgaattctctgatgttcactaagttgtgagccataaataaaggccttgtcacattccttacatttgtagggcttttcacctgtatgaattctttgatgatatgtaagttgtgtagcacgtacaaaggtcttcccacattccttacattcataatgtttctcaccatgaattttctcatgttgagtaagatatgcaacacgaataaaggcctttccacattccttacattcaaagggtttctcacctgtatgaattctctgatgttcactaagttgtttgccacaaataaaggcctttccacattccttacatttgtagggcttctctccggtatgaattctttgatgttgaataagattagaattagaaataaaggctttcccacattctttgcatttataaggtctctcacctgaatgaactctcaggtggtaagtaagttgtgagccacgaaaaaaggtcttcccgcattctttacattcatagggtttctctcctgtatgaattctctgatgttcattcagttgggaggcacataaaaaggctttcccacattctttacatatgtaaggcttttcaccagtatgaactctctgatggtatgtaaggtgtgaaccaagaataaaggcctttccacattccttacactcataaggtttctcaccactatgaattctctgatggtaagtaagttgagagccaagaataaaggccttcccacaatccttacattcatagggtttttcaccactatgaattctctgatgaagagtatattgtgaacaataactaaaggcttttccacatttcttacattcatatggtttctctcctgtatgaactctctgatgttcagtgagctgtgaaccacgaataaaagctttcccacatgcgttacactgataaggtttttcattagtatgaattttctgatgttgaatgagatcagaagtacgaccaaaggcctttccacattccatacactcataaggtttctcaccagtctgaattctctgatgttgaatatagcttggctttttgctaaaggtattcctgtgtttcttaacttcagagcatttttctatattatgattttcctcatgttgaataaggcatgacaggtagctgaaaccttgtctgcattccttacatttgtacaatttttccttggtaggaattatccgatgaaaagtagaagaggttgaatgactttcagtggccttttcttcacaggtaattttgacacacatgtaaagcccttcctgacttgcttcttgaccctctaagttgcctttgcactccatattgtctccaagaccattgtattgaaggtgatggttgatacgtttccccatattctcccactggagtgattccatttcataaatttccttttctggagataactttttggtcacacaactggattccaagtctgtagaataaaaagaaagcaaattcctgcttttgtttacaaggagaaataaaaattctatggtaaaaatgatagatgaaaataattctcattaagaatagaatggcttaaacagtacagaaatattttctgccatttttctttaaaggcacaaggagagaataaagaaaaaggagagcttataggaaagaaggtaattagaaaaataggttaagtcagtggttctcaaactttggaatggcttagagacacccaggaggcttataaaatagtaataaaaacaccctcttgaaaacaaacagatgtgtagctggacatacaatctatcaacaaatcctatcagctctcctgtcaacattaagaatctgaccacctctactaccaccatcctaggccaagtcacccctctctcattgtcataacctcttagctggtttctctgctttcatccttgcttctatgatctattcttcatacagcagccagaggaattcttttaaaatgtggtttatataacatgatttcccctgctaaaaatcttccctattaatggtctgccatctcaggataaaatccaaagtccttaatatggctcacaagaccctacacaagcttgcctgtggccacttttcttatgtcatctcccactttggccacttttctgatatcatcacttaccactcccctaattattcatttggctgtggtcataatggcctccttggtgttaaaaaagtgtcaagcatatgcctacagttttgtctttagaatgcccttcctctagatacctgcatggcttgttccctcatttcagttttctgctcagctgtcacattatcaaaacatccaacacataattgtacctatattgcatttttcactaatggatataccatttctaaagtttgactattgtctgtctgtcccatgcttaatcaaagcaagggctttgtttcatatactgctttatctctagtgcctaacatcattacttacacattgctggcattcaatatttgtcaacaatttctaaaatatatatgttccttcattcataaatctccttagatgcttctcataaaacacaaagtttgagaatagagctaataatctttcaatggtttacccttgtatttagaataaaatccaaactcctattcatggcctacaagcccctttacgatccagttctttcttaaatttctccaatttcttcaacgtaccttttaagcctcaaattgagccactactatcttcagaacaatgctctaatcttattggcctgatttaagttccaagaacatgtcaaattctttcccattttagattttccatatgctgttccatctgccaagaatgctctcaaagtggccacctcctttgcgtgtgaaatgtcctagcttaaatgtcagctgctcagaaagactatcctggatcactttaattaggtccatgccaggtattttctatacctgtaatttattcctaattcttgtttgaatttttgcaattctaaaatttcatttatttatctgttgatctttctgctcctcaagctctacatgtgtagggggaaaatgcctgttttattatatagctagtccccagaacacagtatacatataatgttttattcctttaatatagtttttcatgtcttactttccaatatttattacttaaggccaaatgttcttatatttcccaaagaagtacctcaaaatctcctagaaatagtgacaagtttacacaataaagatcttatattattccgaagaaagaagttgagaaacaagtgtacttttcaaatgcagagaaacctatctgatgtaactggatcagcaggcacagggtctctgaccactgtatataggctgtagaataacaaagactggtcatgggaagaaaaataaatacacatcagtaagctcaaatttaaacagtcttttagaaataagcctccaaaacttgagaaaacacacttttgctgaaaagcaaaaagaaatgataaaaacaaaagcaactacccccccccacttgccatatacacaccacagctcagtttaacaccaattcatgtcagcaacacatcctagaacaagatagaccctgcttttgtttctttcatagaagaacaatatggtttataaaacactgaaagaaatcaatgggcttatggtgattaagggaacactataaggaatcaaataaattcagttgggacccaaaatagctacctatgtgctagtgccctaataaaaatgggaagaaatattaatctaatatgattctggggtaggaggcactatgagaacacaggatggtgctaaacagaaatctagaggaatatagaaaaagttaagattagaataccaaagtctcagaactgtgcccagaatgaggagtacatataaaaatgtattcaattaagtagcagctctttttattgtcattaaattaatgaaaaaactatatggtgaaaaaagggaaaactgcaaaaggggtgatgagtgaagacaacaaaatggagtctgaaaaggaggagtcattttaggaggtttcttttattcttgcccccatcaagtcctactgaatatatctcctaagtagctctcgaatctgttaccttatcaccaacaccactgctgacactcgggaagcccaaggcatcttttttttttttgagatggagtctcgctctgtcatccaggctggagtgcagtcgtgccatctcagctcactgcaacctccgcctccaggttcaagcaattctgcctcagcctcctgagtagctgggcttacaggtgtgcaccaccatgcctggctcatttttgtatttttagtagagataggccttcaccatattggtcaggctggtctcaaattcctggcctcaagtgatccacctgccccggactcccacagcactaggattacaggcatgagtcactgcgcctggccccaaagcatccggaaccacaacaaaaacctactcagtaatgttatgagaccctttgttctaatctccatctggcagatagaatggaatagtaaatatgaaaatcacattatgtcaccatcttaagatttttcaatagcctgcaaaaattggagggataaaatctaaactcttctgcagtatttttcaaacttcttttgactaaaatttcatagtaagaaatacatattatgactgagtacacacactcaaacataaaacaaggatgtcataaaattatctttgctatatgtattatatattcatattttgttattttatctcctgttttattaaaaacaacaagtgctgcttataacctactaggttgtattcataacctctagcaggttctgcccggcctggctccagtcaacctctccgactcccttgtggcacctctgcctcactaggctccagctgcaaaagccttctctcaatacctcatacaaaccaagctccatcctcctatggcctgcagtacactgttacttctgctaggaatgctcttccctcttctctctatcctcagtctccttacctgtttttcattctttcagggctcacctgaaacttcatgtaccattgcacttcctgagaagctgtccccaatcccaggctcctagcaatgctgttccagtaatctctcttctgtaagacagccactccacccactgcagtctacaaggaaagcctccatagctgtggtaagacctccacattctgctattaaggctggcttctccacagagatctcaatttccataagctcttagtgtaatagccttactatccttaagttataaaaagaataaccacccaccctcccctaaaagaccactagaggccaatcctttaatgcctgacatctctgggttatctcaattaccttaaaagctttggtttcctgggtccttggtcatcactaggactcttatcccatccatgtcctacttcactccaaactatgccttttggaattcacagtgtactttctacaaatcgtctacaacctctgccccgcctgtgattattttcttcaccttcttgatccttttgaaactttgagcacactacttggccagaaacaatgttttccttcatgtctttccctccacctcgcttcacctaacctctcccaagatagacataattatagcaagtcaacaccaactcaaggaatcagatatacaaaaaaatatactcaatgttaatttttctacaaatattcctaatcatgacatttaccatcatagaactaattgtattctgtagtctctttggagcaactctaattcaaactgtaattgttactacccaatgagaaaaccaaacagaatgattaaacacaggactttcatttcctgttgtatacactgattggctctttacccctactcatagaattaatctatatctaaaacaccatggattcattaaatatcttaataacctactactgaattcaaatactaccaaacttctgaatagtctcctataaatagaaggcattatagcattcatagtaaaaacaaaggaaaaacaacgaaaaaacccacccctttatatcctccatctttgattaccaaaagcatatgtagaagccccaaatgctgcacccacagttcttgcagccacattactaaaattaataggctgtggtgtaatacaaattactctaattttaaatctactaacagtatatagcctatttctaatatcactatgaggaataattataacaaattctatttgttcatactaaacagacttagaatcactcattgtgtattcatctgtagctcatacagcattactaattatagcatttctcatccaaatgccatgaagttttataggagccctaataactgcccatgaccacacaacatcaaaatgattttgccttacaaattcaaactacgattccaggcacggtggctcatgcctgtaatcccagcatgggaggctgaggtgggcagatcacctcaggtcgggagtttgagaccagcctggccaacatggtgaaactcccagctctactaaaaatacaaaaattagacagggatggtggcaggcacctgtaatcccagctacttgggaggctgaggcaaaagaatcgcctgaacccaggaagtggaggttgcagtgagccgagatcacaccactgcactccagcctgggtgagagagcgagactccatctcaaaaaaacaaaaacaaacaaaaaaacaaattcaaactatgaacaaatccatagccaaaccatacacaaggttccccaacttatgatacttagacttaagatttttcaaatttaccatggtaagaaagcaatacacattcagtatgctccttgacttaccaaggggttacacagaactacttacaatatttttgacattatccagaagtaaccccaacatatgttgaggagcatctgtactactagctcgcagactacagacattacttcctttaacagaaacatgataagtatgggctagcctaactgacctagccttttgcaacaactttttggctcctaaggccaacagattgcatctaacctttaaaagttcagaaagctatattgttacatatgaaggcatgagttagcagttgatagccttactatcaactattaaccagaatggagaattattttaaattatatctttttttatgatctaattttaccattatccaaatagactatatggccataattagtacattagtcctatctatcaatcacatcacaatgagaaaaattcacatatcacattaataacatcaaaccatcattcacatgagaaaatactctcatatttatacatctcctacttctgttacccctatcacttaactccaaaattattctaggacccatacactgtaaacatagtttaaataaaacattcagttgtcaatctatatagaagcttaaaactctttactgtagttcccccttaccaaggttttactttgtgtggtttcagttactcatagttaactgaggtccaaaatattaaatggaaaataccagaaataaacaattcataagttttaaactgtgtgccattctgaatagtatgatgaaatctcacaccatcctactccatcttgctcaagacatgaatcatccctctgaccagcatattgtctaattttgccattatccaaataggatctgcctattagtcaccacccagtagctatctcctttatcagattcaaaaaacacataatatatatggctcagtactagctctggtttcaggcatccactgggggagccttggaatgtatacgccgcagataagggggaactgctgtttttgctaagaaagtatgcaagaactgctaactcatgcctccatatataacaatgtggctttctgaacttttaaaggttagaagtaatctgttggccttaggagccaaaaattggtgcaacttcaaataaaattaattaatttcttctgttcttctatcataattttacttaccaacttatttttaccaattactataactatttacaaaaatactcatttgccaccagcctatttccaaccctaatatttattcattcagggcaagaaataattatttcaaactgacattgaatgactttcaaactttaaaactgacactcagctttaagttagactacgtctcaataatatttgtactagtagcttctttcatcacatgattgattatagaatcttcaatgtgatacatactttcagatctaaatattaatcagttacttaagtacatacttatattcctcaccaccacactaatcttagctaatgccaccaacctcttccaactcttttttttttcttccaactctttattggatgaaaaacaacagaaattatatcatttttacttaatggatgataacacagcctaacaaacacaaacatagcagcctccaggcaattctatataaaagtattggagatactggattcctattattaacggcatgattgttatactcaagcatttgagaattccaaaaaatttccacactcaaccccaaccctgacactgtctaattaggcttctcctggcagcagcaactggtgaatctgcccaatttggttttcacccataactgccatcagtgacagagggctcaacactagttttagccttacttcatttcagcacaatagctgtaacaagaattttcttattaatacacttttatctactaattgaaaataaaacacagtggggtgcagtggttcacaactgtaatgctaggactttgggaggctgagtcaggaggatcgcttggacccagaagtgcaagaccagcctgggcaacacagtagacacagaccttgtgtctacaaaaaaaaaaaaaaaaatccgccatgcatggtggtgcacaactgtagtcccagctactcaggatgctaaggtgggaggatcacttcagcccgagtgtgaggctgcagtgagccgtgactgtgccactgcactccagtctgcgcaacagaacgagatcctgtttcaaaaaaaaaaaaagaaagaaaaagaaaaaagaaaataacaaaactgcttagctgctattactactttattcacagcaatctgtgccctaacacaaaataacattttaaaaaatcattgccttttccacctcaaacctaggtctcctaattgtcactagtggcattaatcaaccacatttagcatttcttcacatctgtacacatgtattcctgaaacatatactttttctatgctctggatccattattcgtaccctgaatgatgaaaaatattctagaaaactaggaggcctatttaaaactatactctttatgtctttactcatttttagaagtctacacttaatagatatgcctttccttaaaggcttctactccaaagatttaattattaaaaccgcaacgtatgctaacacctgagccctttaaatcatgcttattgtcacctccctaagagctgtctatagtactcaaattattttctttccagtcctgggacaaccctgcttttcaactttaactcaaatcaacaaaaacagccccctccgagctaattcaattgaatgtcttgcaatcagtattattttcactaaatttttttatctccaaaaatattattcccataactattccccaaatgactatgccactctacctaaaactcttagctcatgctttaactaccttaagtttcattataacattagaactcaactaataacataaaatcttaaatttgaatcctcatacatacacaaattttccaaccttctaggtttcttcccaacagttgttcatggtttatcaccatacctaaacttttcaacaaacctaaacatagcaccagttttagtagatatgactagaaaaagtcactctaaaaatcatttctaacttccaaatgatagtttcaataaccatctcctaatgaaagtattttcttctccttccttatctcacttttactggctatactcctagctatctaatttcccagagtaatctcagtaacaataaagataccaacaaataaagatcaactggccacagccatgagtcggccttcataactatataatgctgttatacctacagaaacttcctgaagacgttcaaactcttcaccctcaaaaattacccaatcctttacattttcaaaatcaaaaatcacctccacttcataacctgttattcacataattataaataactctatgaacaaacctaacaatacaacaccccaaataacaaaactagaacctcaagtctcagagttctgaagctgatgttccacttaaactataacctgactctgctacttgagaaaaattattgttaaatgctatgtcagtactgagaaaataaaatctaactactttatggatgcattatgtgcttttcctgataataatgtactagtactattatgcttgattgtacattgtatatacatgtgtaatcatacattaagatccactccccatgcatataagcatatacatgaaattacaaacagtgcttaacccattgaatggcatacccacatatgtcagatttaccatacaaatactgttcaatacattaaatccttatattttacataggacatgaaattattgattattcacagtacattcagtcaaatcaatccttgacaacaagcttattaccgccaacaggatttctttagtactaagcttcaagaaaccagcaacttgcttgagatgtgtcccacttctcgttctgggcccatgaaacttggatgaaactatgcctgccatctggttcttacttcagggtcacggacttaagattgcccattcattcctctttaataagacatcttggtggactaatggctaaccagtccatgatcacacatcactgtgatggtgtcacacacttggtattttttaatttagggaatgttgtgatccaacatggctgtcacggacttgatgcaataaagcaaactgtagctgagctgaaattgaatagtctttctctacactgaaaccataaagtgttaattactccatgttcggtggacatagtaaaaaacatgacacaaacatatacacacaatttccgttaattaactccacaatctcaagctattgtagtatttgtggatataaggcttttattcttgccaaacttcaaaacaggaaatcttgtatttattaactacaggtaaggcatacatgcatacacacacacacacacacacacaagttcatctagaactaagttttagcccaactcctaaagaatttatcaaaatccaaaaaataaattaaaaattaggctttctgggttaaaagtttgttttttactaaatttactaaaaaatccaccaataatgacacagcatttaaacttagccattttttcttgagagagaattttccacatataagctaatgtagcttaattcacaaagcaaggcactgacaatgcctaaatgagttcatataactctataaacaaataggtttggtcctggcctctttattcatttttagtaacacttgcaactatctgcattctagtgagaatgtcctctagatcaacaaaaataaaatagagcaggcttcaagcacactaattagcagctcgtaaaaccttactctaccatacagccacagaaaacagcaatgataaaaattaagcaattaacacaagattgactaagttatactaattttccttagggtttgtaaaatttcatgcttgcagtcatatgactaacccaaattaacaaaacagcataaaacatgtttttaacaaaactcagcataaaacatgtttaagattataaacaaagttataccttaactaggtcataaaaagctacagctaatataaaaataaactatgaaagtgatttaatatattctgaatacatgatagcaaagacccaaactgggaagaaataccccaatatgcttagccataaacttaattaaattaacaaagttattcactttgttaattcaccagagtaactttgttaattcaccagagtactaccagcaacagcttaaaacacaaaggacttggcagtgcttatatccctttttttttgtaatcaataaaccccagtaaacctcactatctcttgctaattcagcctatacaccgccatcttctgcaaaaccttaaaaggtactaaacacaagtatttacataaaacgttaggtcatggtgcagcttataaaacagaaataaatgggctatattttctaattaaagaacattccatttacaacaaacttaatgaaatttaaggcgaaaggaaaatttcatagtaaattaagaacagagagcttaattgaatagggccatgaagtacgcacacaacctttcatcaccctcctcaaatatttcaatatatccaaatttataattaacataaatttatatgaggtaaatcataacaaagtaagcatactatatgctttaataaaccaaagtgtttattaaaaccagcctacatctggaaggtttcatattgatttgaccactttgaaccaaacctagccccaaatcaacagaacctaacaattatatttatttagaccaaaacatttactcacaacataaagtataggagaagggaatttcttcaggtgctacagaaaaagtatcataatgcaaagatgaaagaatattaaggacaaaaaaagcaaagctaatcctttataccttttatgtaatgaattaacaacaattttacaaagagaactttagctaaaaaccccaaaaccagacaagctacccacagactaactcatatatgtagcaaaatagtgagaagatccatgagtagaagtgaaaatctggtgatagccggctattcagaacagaatttcagttcaactttaaatttactcaaattttaatcaatgtaaatttaaatgtaactctaggggggcactcaagatggctgactagaagcagctagtgtgcaccactctcagggagaggaaacaaagtcggaagtaaatactgtctcttttaagtggatcatctaaaacagggatccccaacccggagccacagaccgtactgtttggcagcctgtggggaaccgaactgcagagcaggaggtgagcagtgggcgagtgagcatcaccacctgagctccgcctccggtcagatcagcggcagcttgagattctcataggagctcgaaccctatagtaaagtgtgcacaggacggatctaggttgcgggctccttatgagaatctaactaatgcctgatgatttgaggtggaacagtttcatccccaaaccagtccgcccttcccctctcgccccactccccacggccagaaatactgtgttccatgaaaccagtccctggtgccaaaaaggttgggatagcgctggtctagaagaccatgtcaggatttaccacggacgccagggaactcacagagaacagagagacaagccaggcagccaccttcctgggactggcatggagtgggagaagctccctaacatggtgaaacggtgagagagtgagagtccctggggaagccacacttcccacatggccctttgcaatcctgggcacaggaggaacccccaactcccatccctgggccactagaccaacacagaaagccacctagagtttttgcagaggcactgctcaagcccatgtggagcaccacaagccccggatccctgagcagcttggtgccagctgccataaccccagtggaagccgcagtcacagtgctgaggggcggtcagaatgcccagcccctcctcgccaggaaaggctcggcttcaccctgcccccgcctgagctccccagcacagcgaccctgtccccacctgaactctgcaggcaggcacagctccacattcccccaggaacctcccagatagcagaccatgcaacccctgccctacctcctctgaggcggctaaggctcttccagcgcagcaaccgcacctctgcagcaaccgcacctccgcctaaactctggtggcctgaggttctgtgttcctctggggcagaactcccagaggtaacagataacacttggcacctctgtatgccctaaacagtgaagttcggcattgtttggaagggagggaagggcaagcgcgccacgtgctccgcagctgtcagtctccattgcaggagtcctgctccagtgaaaggcccacagcacagccgccctgcccccacctgaacatttcacctgcagcccagagcccttctgaaaatccaaaccccacataccgtgatattcccttgggctcccaccacctaagtgttctgtaggaccctgcatgagagttcgaccagtgacctggaaaccaacctgtcccacctccccacatcatagccagcacctgaactctgggctagcccgactgcagtccagccccttcaggtctcacacaggttgtccagtgggccagctaggggcctggggggaactggggaactacttgccccattccaactctgctggcgcctgaccatttcccccagggcctgaggtcagaccaacccaaccagctgacaccagcacaacacccattcacacaggccctgtggaggaagccccttctacaggaagcagcagtactgtgacatcggaaaacaggtgacccttaaccaatggggaaaggattccctattcaataaatggtgctgggataactggctagccatatgcagaagaatgaaagtggaccctacctttcaccgtataaaataacttaagatggcctgatctagtacatgcagaagcctctgaagatcttaccattttctcattacattttgcaggtgtttcatcaattttcagagctactaattttaattttattacagttataaagccaccagccatatctaataccagacaccactattaattgcagctgtgcttttattactctctctcccagtactagcaaccagcatcaccatactactgacagaccataaccttaatatactttttttgatccagctggaggaggagatccaattttaggccaacatttattctgatatttttgtctatccaaaagtgtacattcttattttaccaggttttggaataatctcacatattgctacctattattctggaaaaaaaagaaccatttgattatatagaaataatatgacccataatatcaatttagctcataagctttatcgtatgaggctatatttacagcacggatagacattgatacctgaatgtattttacactagctactataattattgctattccaacaggagttaaagtatttaactgactagcaaccctacatggaggtaatactaaatgatctccagctatattatcaggtttaggctttattttcctgctgacagttggaggcctaacaggaactgttctaactcatcagcagacatcaatcctcatgatatatactgtgctacagcacatttctaacatgttctatcaatagctgcagtcttcaccatcacaggatttattcactgattcccatattttcaggttatacactcaacctgagccaaaatccattttgtatttgtaggtgttagcttgactttctttccacaacattttcttgatttatcaggcatgccatgacaataactacactgatggatatacaacatgaaataccatctgctatggtttggatgtggtttgtacccaccaaatctcatgttgaaatttagtccccagtatggcgtcttgggggatggggtttagtgggaggtgcttgggtcatgggggctggtccccgagaacagattaatgccctccctcaagggtgactgagctctcgctctactagttctcaagggagctggtttttaaaaaagcctgtcacctttcccctctcaccatgtgatctctgcacacactggctccccttcaccttccatcatgaatggaagcagcctgaggtcctcaccagaagccaaacagacataggtgccatgcttcttgtacaacctgcagaaccacgagccaaataaacctcttgtctgtataaattacccagcctcaggtatcctttatagtaacacagtatgaactaagacacctattacacttgaattagttccactataacactttgaaaagtgaccagcatctatgtttaaataccaaaactagaaacatccacataatttttttcaataattctagcattatttacttcaattgaaatttttgaaatatgcctattcttaaaatccatcaccaaagaacactgaagccttaaaacgtgagacccccttgggaaaaagacaagctaaaatttattcacatctttcactattcctacaataataggacaatttatttatattctaatcatttcattcccaaacatcatgtttcctacccccaattgccaaatccataatagattagtctctttttaataatgattagcacaacttgtactaacataataatacataatgtcaaaggatgttattaccaataacagcaacacgtcttaaagcacactttcaagcaaccgtcctttttgaccaccaccactgaagttaccagatcatttacctttataccacccctccagcattttatctccatttctttctttctttcttttttttttttttttggagacatggtcttgctctgtcgcccaggctgaaatgcagtggcgtgatcatggttcactgcaacctcgacctcggggctcaaatgatcctcccaactcagtctcccaagtagctaggaccacaggcatgtgacataatgccctgctaatttttattttaagtagagatggggttttgctatgttgcccaggctggtcctgaattcctgggctcaagcaattcacccacctcagcctcccaaagtactgggattacaggcttgagccattgtgcccagcctaccaccattttaaagattctcctgtgaaaaaaaaacaaaaaacaaaaacctctcctgattctgtggttcaccctgcagtggacaggagctgcagggtgaaccaggagaatggcaaaacttctcaagaggtatgcatgcttcctgtctataccttttgcttttctttctctcctaccaccataattaacattttgccatatttccttcctaaatttgttccatggatttttatgtagttgaaataatactgcatatataaactctaatcacacttctttcccctaattattacagtgttcttaaaaccttctaaaatattgtaaactctatttgtaactttgagggttcctcaaatgggccttcaacagtgcctggtgagttaattcactgtcccactctagtttttattgttgacttacttctttctcactctcttttaaatactccacaatgaggtttttgttcctctcattgccaaacccaccttgtcagggtcaccaacacccttcatcctgccaaatccaatagccaattttcagcgttcctcttacttgaactcctagcattatctctctcagctaactgcttcctccttttgtcagttggcttccaatacactgcattccctcttcctaggtcacaggttactcaggttagtcctcaatttcctttgctagattgttttcctgactgaatgttggaacaccccatggttcagtccttgagctgtaccttgccttccgtctaaaccaattcgctccataatctcattcagttcctcggtacagagagtaatcccatatttatctcttcagtcctgactatcccctccacccacaggcttccaaatgcttatctaacttcaccacacagatatctaatgagcatatcaaatacgtaactcttgacttccttctccagccttccaaaccctgatgcctctattgccaatcttcaaaataactccattatgaaggtattaattctaccttcaaaatatagcctgttctcatcacctccacatattaaacccaattccaagccactgttatctctagtgtgaacttctgaactagtcctctcattagtcttcctgctttcatttttatcctcactgttcacatagcactcagtgacctctaaacaaagatcctttacttgtctgcaaaaagtcagccaggggctccctatcacacttagaataaaatctcactgcttgcaacaaccaacaaggtcctacatgatttgacctctgcctatttctctaacctcacctcaaatttccactttcagtagccacactggccttcttgctgattctcaaacaagtgaagctcagtttctctcaggatcttctcttccctctgcctgaacacacctttccctgatttacagccaactttattcaggtcttaattcaaatgttacctcccctgagctatcattcctggtcctcctaacctatgaacgtagcaagctctcagtacgtatgtgctggctagagatacttatccaagtttaactataaaagagcaaccaggaaaaacgtaattcaaaaaatagataaaagcattgtccccaaaagagatcagaccaaaggtagctcccttattaaaacaaaaagggaatgtaaaacagaagagtggcaaatgggagttgggagggaggttccacggggaactcacacacataaccttcctgctctccctatgtctcaagccttctttccacaggcctttgaagagagcttcaggcacacacctcaaagtgctgccacctacggatcagctgtattattagcaatagctgacactgtgaccagcctttattcacctgagctctgtctttatgtcatggttctcatcagcatccagggctcctttccttgctccagtaaggaaagtatatttggcttagggactgcacatacagcttaaaagaaaggaaatggtgcatggtcatgctaggggattcccagattcaaatctagtccattggcatcaaagaagggagacactgacaggaagtgacagagaaagatgtgacagtctaaaggataagagataaaaaggtacacggtggagctgtccatttctacttctactcaaacgtaagcctttccttagggaatggagatcagaaattcacaatgaatgaggcagaaattatggggaacaaattctgaatattacgtaggatgatcttacccaatgagatcaggttgctgtagttctccaacatcacatccctgtacaagtccctctgagcagggtccaggcattcccattcctcctgagagaagtcaatggccacatccctgaaagtcaccaacaactgaaacaacaaatccattacaggatgattctacaggaatgattctgaagtgaaatgagaagaaaatggaggaggtaattgaaggaagcaagtaacacaaaacaacaggaaattggttgcctaaacagtagtattaacctgattctctatcattcctattgccacagataaaacttcctctgtacaatagaacaattccattatccagaaaggtctgagaatttaaaaagccagatgtgtgcagtttcttgattaaagaaaatactgcaagcgttttcttcacaacaggttttaattgcacagcagataaggcttccaaatcctcaataactaatatactctcaattaatacaagttcttgctctcccttctgcctttaaatacttttaaaaagatgaatttttttccaaacaatgtttaccaaatctctaggttagaaaataaaatttgaatataacctaagaattttttgaagactcagattcatcaagttatattatgtcacagaacagaatggacatatttccattttacatacaaaatgatctgcttatttgggagtatctgaattagacaaattctcggccgggcgcggtggctcacgcttgtaatcccagcactttgggaggccgaggcgggcggatcacgaggtcaggagatcgagaccatcctggctaacacggtgaaaccccgtctctactaaaaatacaaaaaaaattagccgggcgtgatggtgggcacctgtagtcccagctactcgggaggctgaggcaggagaatggcgtgaaccctggaggcggagcttgcagtgagccgagattgcgccactgcactcccgcctgggccacagagcgagactccgtctcaaaaaaaaaaaaaaaaaggaattagacaaattctctaatgtctttgagctcttagaatctataattcttgagagtatgcatctggcatgttttatttgctcctattttccacgttcctaggctatagcaaggtactggatgccagtccaggcacacagagacatcactctgaactggtacattccgggaaatcccaaggtgaacttgactatgatcatcctctctcattggttcctgggcaagagggttgtagaaggcagaataaaggccccccaaacatgtccacaacctaatccctgaaacagtaacagtactgactcaatgataaagaaaagcttgcttgcttaaatataattactttgcttgactttgtagattattcagtaagaacagtctcaggaaaacaggaccttcaacagagataagagaattaaaatatgcagactaacaactctgggaatgggctgaccagcctgataagaataggctgatggcacctacagaaggccacaaaacactgaccaagaaagcaatgaccaacaaagcaatgacctgagactgcacatttcacaagaatgttttgatcatcattttttctaatttcccttaaaaacccctgatatggagacagaactcggcggtctttgaacactagttcactgcctcccctgggttgttggattcctgaatagagctaaccatcctttcaccaatgctcatctcttaaactttcaagtgacaagtggtctggacctgaatttcgttacaaaacctatgtataccttaccttacatggcaaaggggactttagaagtgcaattaaattaaggatcttgagagggggttatcctggattatctggttgggcccaatgtatttgtaagtgatagagggaggcaggtgagtaaaaaaaggaaacgtgatgatgaaagcacaagtcaaaatgtgattgctggctttgaaaatggatggaagccacaccccagggatcgtggacagcctttagaaccagaaaaggacaaggaaacagattctccagtcctctagaacctccagaaggaacatggctctgctaatactatgatattagccctttcagactgatttcagacttctgaccagcagaggtataaatcataattatattgatttaagccactaaattagtggttattagtaacggcagcaacaggaaactatatcagcaacaagactccttccttcatagaacccaattcccaaccaattttcaaactttcacagaaaatcttgccacacactgagactaggaacatccaacaaaaaaatgctatcactttcaaatggaaaacccaggattgtagagaagatcaaattttgtcatgtatcacatttaaacactcatctctacctcaccaaaccgtggtactaatgtgtaccaatcttaaaaggaggtatttctgttccctcagagctctgggcagaagactatgcctgtggacaatgtagaattatctgctgaatgaatatctgaaaactgtttggagaggggaaaagcattgagaagaattgggctctttgctactattactcgctagaatgggagacgtttggaagcagttcccttaaggaaccaaacaaggcaggaaattctgggataaatctggtgttcacattacacaacaaaatgattgtacttcaagaaggaaagaaacagcaactcacgtggggcatggttttttagaactgatcaattttctgggttcttctcctggaggtgtgcaaagtccagagaagccagtgctggacaaggaaaagaagccacaagattagacttggctcacagcccacaaaataaactacttagaactacctttacttctcctcttttgggaatttggaaaaaatctcagttcttccacaaacccaatggaagccagctactgcagaaggggttcaggcagacctttccttaatgtccatgttgaacaggaccctaggtgctgttactttcccatggcatctcctcttccacagtagaacagaggcatgcccagggagccccccaccatcctcctggacccaaacactaagtcaggtactttgctcccaatcttaggaaggggcttcagagaccaaaatgtggccttctttcagacgtcatgaacatcagctagactcacagacattttgacagacatatcagggtcaacagatccaaaacagtctcatcccactcccctgaatctagttctttcttgcctgtttactcttccctataaaagaaaattcctttatgcctgacctttgctatgcttgcagatcttatggctggagtattctcccaattacaacacctcctcccttactgcagtgttcctgtgaataaagtcattccttaccaaagtctggatttgtttttttatttcacaggttgaataacttttgtagaataacaaaacaaactattttaactgtaacctaattctccaagccatggcacacacagaagcacggagggtcaaacaggagcaacatccacatgacagccaatgtgcgcacagcacgccccctcttgcaatatgacttcaagattgagcaagttccccaactagagccacctacttgccatagttgtgtagcactgatcttttttttttttttggtagcattgatcttgcatacatgtataatccatgaacttaacatcaatgttacttgtgtgataccaagaaaacccagtaagagagcaggtaaataatttaagtaagattttgttgggtatagttgagctttgaagcaccataagccattgtactaagattttgtcctccccgctaaccaattttcacctcctttgaggcaatatcatcgtcattaagaatacatgggttggctgcacgcagtggctcacgcctgtagtcccagggaggccgaggcaggcagatcacttgaggtcaggagttcaagaccagcctggccaacatggctactaaaaaatacaaaaattagccaggcatggtggcacatgcctgtagtcccagctacttgggaggctaaggcagaagaatcacttgtacgcgggaggtggaggttgcagtgacccaagattgcgccactgcactccagcctgggtgacagagcgagactccatctcaaaaaaaaaaaaaaaaaaaaaaaaaaaaatcccatgggttaaaataatatatataaaatgatataaagatgttaacctctgcaagttaataggatatttgacatatgatatacaaattaaatatgaccccaataaaagtacaagtatgaaagcagatacattcaatttaaattcaacaagcaagaaaattaaaaagcaagaattggaaaaaaatgcctgataataaagagaacagagatttcaaaataccactcctatcattaaaatgttggatactgtaaaaaggaacaaaatcatatcctctgcagcaacacagatgtggctagaggccattatcctaaatgaattaacacagaaacaaaaccaaataccacatgttgtcctttataactggaagctaagcactgggtacacctgaacataaagatgagaacatggacactggcaactactagagcacggagagaaggaggagggcaaaggagcaaacctacctacctatcaggtatcctgctcactacctgggtgactggatcataccccaaacctcggcatcacacaatatgccatataacaaacctgaacatgtaccccctgaatctaaaataaaagttgaaattttatttttaaaaagttggatactgcatatgaatagaaagaaaagattaatgtaactgaatagaatctctgatctctggggaaaggtggattattcagtaaatgttattggagaaaggtaaaattggaaccccattttataacacatacccaaattaactccaaatatataagatatctaaatattaaaaaatgaaattggcagggagtggtggctcatgcctgtaatcccagcactttgggaggctgaggcaggtggatcacctgaggtcagcagttcaccgtcagcctggccaatgtggtaaaaccccatctctactaaaaatacaaaaattagctgggtgtggtggcgggtgcttgtgatcccagctacttgggaggctaaggcaggagaatcgtttgaacccagtaggcggaggttgcagtgagccgagatcatgccactgcacttcagcctgggcgacaagagccaaactccgtctcaaaaaaaaaaaaaaaaaaaaatcacaaaaatgctagaaggaaaaacagactgttccttcttaacttcagaggggaaaattctgtatctcacaatcatatgaataaatgttcctacatttaaaaattgcctaaaagaatacacagacaaatgacaaaatgggagaaaatatgcgcaacttaaataaaaaacagagtcctaaaatccaaagagctgtattttaaaaatcgagggaaaacaagagaaagacaaaaaaatcattattttaaatggacaacagacaattcataaaaaaaaagtcaacggtcattcaacatgtaaaatgctcatcatttaaataaagagaaattcaaattgaaacgaaattgagaagacttctgaatccaatatcattaagatcctactggactaagttccttgaagatacacctatcagatctggacataatacaaaaagcaactaactgaaggtgctggccaatgaactgaagcagtattcctacaaaaaaatgcaaaaattagccaggcgtggtggcgggcatctgtaatcccagctacttgggaggctgaggcaaagaattgcttgaacccgggagttggaggttacagtgagccaagatcgcgccactgcactccagcctgggcaacagagcaagactccatctcaaaaaaaaaaaaaaaaaaaaaaagcacacttgaattgaatcatgaggaaacatcaaacacatacaaactgaggaacaatctacaaaataacaggcctgtagttttcaaaaaagtcaggatcacaaaggatcaaagaaaagtccaggaattgttttccattaaaagagactaaagagatgatttaattaaattaaatgtttgatcctagatatgattttggattggacgccagataaggggcaaaaaaaggctataaggagctgggcatgcggtggctcatgcctgtaatcccagcacttcaggaggccaaggcgggtggatcacgaggtcaggagatcaagaccatcctggctaacacagtgaaaccctgtctctagtaaaaaaaaataaaaataaaaaaaaattagctgggcgtggtggtgggcacctgtagtcccagctacttgggaggctgaggcaggagaacggcgtgaacccaggaggcggagcttgcagtgagccaagatctcgccaccgcactccagcctgggggacagagtgaggctccgtttcaaaaaaaagaagaagaaaaaaaaagctataaggacaaaattgtaacaattggtgaaatttttctatgaactctggattagacaattattacatctctgctacatttcattttaataaatgaactatagttatagtcccctgtgctcagaaaatacactaatataattatagataaaggaaaatgatgtctgaaaattactatcaggtagttcagaagtatatatgtagagagaattagcaaacaaaaaagcaaaatgttaaaaactggtaaatatgtaaggacataggacagttttttctattatttttgcaacttctctgtaagtgtaatattatatcaaaataaaaattttaaaaaaccaatgctatgtgagtactgatttttaattaagagactaaagaggcataaccaaatgtaatccatgaaccttaaatatagcaaaacataaaaaccaaaagaaatctaaaatgcattctctatcttaacagtagtgacagttactgttgttttcaaacaattatattttagaataaagaacgtaaattatattaatgttttagcaaccaagattgttagcataaaacagagatacaagtataaaatcaaacaagaaaatactctgtaatttgtctgaactattattataaattcatgattcatgatttatactttaaaaacaagttattagctttgttccctgaaatggcctagaataaacgacagccttatggcaatgagaaactctaatgcccagacagtggtcactgtacactgtataccacaagaggaatcagaactccttagagaaatggctcatttcagggctggcacaggaaatgtagaagttgatcttgggatcatttgttctgccagaaagcaaataagctatcaactctactagaatcatgacagaaagacacagaactgcctggaaaggactaccactggcttaaaaaagagcagtttgatataaaaaagaataatgatcacaatagttcgaaacatatggtattcaaaacagacactcccttttgggactccttagaaggttgtagggcaccaactcatttctctgaaaatatataaagggaaagaatcaaatcaattactctgcctttccatatgaactgtatttatttatcttgagatggagtttcactcttgttgcccaggctgtagtgcaatggcgcaatctcggctcaccacaacctcggcctcccgggttcaaatgattctcctgcctcagcctcccgagtagctgggattacaggaatgtgccaccatgcccagctaattttgtatttttagtagagacggggtttctccatgttggtcaggctggcctcaaactcccgacctcaggtgattcgcctgcctcggcctcccaaagtgttgggattacaggcgtgagccaccacacatggccatgaaccgtattttaagataaccaaatacttgatgaaaaaaagttcttatatatagaagaactgtaactaatgaatacaggaggaattgagagaatttttttttaatcaccatatataactgttaatgaatgggccaggcgcggtgcctcacacttgtaatcccagcactttgggaagctgaggtgggtggattactcgaggtcaggagttgcagaccagcctgggcaacatggtgaaaccccgtctctactaaaaatacaaaaattagccaggtgtggtggcacatgcctgtaatcccagctactcgggaggttgaggcagaagaaccttttgaacctgggaggtggatgctgcagtgagctgagatcacaccactacactccagcctgggcgacagagtgaggaaaaaaaaataaagaatggatcttggtatcaatcataagtggacgttataacctttaggtcagtgcttctcaatccttctaaaatttttcacggtcatatccctaggaacctttttagatacttttctctaatagccaccactctcatgaaattttattaccatagatatactgtatatatgtttatgtactgtggccctttggaggaccacagatcattgtaatacctatgagtttttgtcctcttccttctcaaaaaccaagtttcacccacttggaaggtgatatcctccaccctcattgagaatgcatgctttaggtgaaaaaaaggaaaggattaaatggacagcatttaaacacatcaatatgacatcactgaaagtgggacatcagactgtaagggcctcatgatgtgatgtaataggaagtacacagcaccaactatgaattaaaggtgatttagggaaaatctgatccaaattccatcaaacctctagatctaactgcctgtttacagaaatatgaaggaacggaaaacaaattataagacagtacaaagaagcaattagctaaaagcagtatacagaatattctacgggacagatgatctagtttttctacaaatcaacagcaccaattaaaccaaaacaaaacacaggagggaaactatcatgcattaagtaagtttaacaggtttggccaccaaatgcaatgtgtggactctatctggatccagatttgaacacacctattgtaaaaatatgtctttgaaataattgggaaaatctgaatatgggggtatacaagattatgaaataaccaccacgctgttacaccaacataagaaacaaatttattgttttaaacttattgttagtttttttttttatgttggtataacagcatcatggttattttaaaatataatgtcctttttggtaatatatgcttataagaggataaaatacaattttgaaatactataggaaaaaacggggaaggattgatacaaaggtatttacaaatgtttttaattacagctaggtgttgaacatgttggggttcgtattattctttagcctgcttgaaaacatccacaataaagttaaaattttaaaactcttcaaatttcccccagaaagtacagttatttttcatcaaaaccttagaccaggccaggcgcggtggctcacgcctgtaatcccagcactctgggaggcccaggcgggtggatcacgaggtcaggagatcgagaccatcctggctaacacggtgaaacctcgtctctactaaaaacacaaaaaattagccgggcatggtggcgggcgcctgtagtcccagctactcgggaggcttaggcaggagaatggcgtgaacccggaaggcggagcttgcagtgagccgagaccgcaccaccgcactccagccagggcgacacagcgagaatccgtctcaaaaagcaaacaaacaaacaaaaaaatcttagaccagaaaggactgctgtatcattgggtggaaaggagaggtgtagtgtggctggggagtagagctaaactgatgatcccatccccgcagcatcatttatggggtgcctaaggaccagtcactagcatggctggttcttccttaggaagatgttgctggaggtagaaaacgtttcggaaaggaagaaatttgaggttagaaagaaaacaggaacttcacacaagactttcagaagtgcgatattcttttcctctgggtgcctctcttggaaaacgcagaaccgagaaaagaaataagcatcatagaacatcagagctctcggagcagacgaaacaatttaggataacaccaacctctagaaagggattagtcttccccacagggctgtcaagctagaataggacatctttaacagtggtcttcttcctaagacacttccaggggtaaagcctcaccatcagggaaacttcaaaaagagcctcttactctgcaaagaaactgcagcagctgtaaccgcacgattctcagctggcttaatgatgtccgtgtcacacgaggagtactgcggcccgggaggggccaagcgctaggagcattaacaggcggcaggtgagcccaccccgcggccgcacaagcgcacacgcacacgtccagggcggaggaacactactagtaacacccgcctccttctagcctccctatcccaaagttatggtgccgattttgtccgcggcaggggctccaggggcacactcataaattcggtgcggaggaacacaactagcagcaccacacccccgccactgccagaaccaaagtgacggtgccgacacccctccgcaagcgcaaggccgacttccataagtaattagccagagcaccgtcccgttcctgtcagcaccgagccccagccaggacaccggtattcccagcaccatacaagaactactttttcgatgaagcaacccaaaagctgcgagcggttcccggtgaggccgcccactcacctggccggcgcagacaagctccgtgcgtcaagacataacagcgtaagtgtacgacgttgcgcagcgacgcgggggccttcgggaaatgtagtctacaactggaaaccggccggatcgtgtctgcgcaggcccagcagctaagatcgggtccggcgctccagaacagaacgatccctgaggctcccttgctcgaactgtgggacttaccctactatggtccgagcctaccctatttcattatactcaagtaacgccccagaaattccagagaatctcacacaaagaggttgagtcttgccgtggtgccttcaggggaatgtcatcccgggctagaagagctgcaaaaggctgtcaggtaaggtctggatttctctctgacagctctggccgtgacgcagtggccacgataccgggttgctgctcaacggggttcggaagtgtgacgcattctttgcggccatgtgtgtgtgtgtgcgtgtgtgtgtgggtctgtgcgcgcgcgtgtccgagtgtcctctgtgggtgcagagtgggtagtggccatgcctgtgtgatgtgcgtcagattatgcttgaggctattagtggcgcatttagtattgtgtgcggaagggtcttgggaatggtttgattatagctttgagggtgactgatgtctgtttaatcagattcagcctgcgactgagtatcttataacctgtaagaaattgatttttctttgcatggtcatgaatttaaaatagattcccatgaaattatataaatgtagtgaatgattcattgagagttcgcctgtggcagtgaatgtggggaaagaagtgtgtgagcataatatggtgagaatgagcacgattgtgtgcagcgctgtattatagtgatatctcctggcttcagttttctcacctgtaaagtgagggtgtcagtcgtgtaacgctttggaacaatgctttttaataggaatttctgcaaaactgagttccattttttatatctgtgctctccaatatagtagccactagctacatatggctattgagaaattgaaatgtggctggtttgactgaggaacgaattttttaaattgtgttcaattttaataaatctaaatgtaaacagctatatatggctaatagtcttcctattgaacagtacaacctggagcattaatttgccttcaagatttgaagggggtaaaaacttaattcatctagcaaatatttgaaaatgaaattcttaaaacttccttaaatttttttttaaatttgagatgattgtagattcatatgaggttgtaagaaataatagagacattgtgtgttatcttcaacttagtcttctccaatgacaacatcttgcaggactgtagtataatatgacaaccaggatgttgacattgatagtcaagatagatcatttccatcacctcgaggatctgttgtgttgcccttttatagacaaatgcactttcttccctcttgtttgaagatattcgcgtcaacattaatgataatgtaggcatacctcattttattgtgcatcattttattgcactttgcagatactgtatttgtttgttttaaagagacaggctctcactgtctcacccaggctggagtgcagtggtgcagttatagctcactgcagtctcgaactcctgggttcaagggatcctccagctggcccacaaagcctgaaatatttattatgtggttctttgcaggaaaagtttgcagactcccaatctatattatttctgatggctactttattttctattatatggatacactagaatttatttaacctgttctttattgaagtctaatttatgtttgtatctagctttttccattttaaaattagtctatctgcacctgtctgcatatatcctagtgaacatatataattattttccttagacagggtcataggagtgggattactgaaacatctggctcatattattaaattctgctaatataaatttctaatttaccctctttaaggtggcaccagtgtataacatggcgtgagggcatctattttactccagtttaacatgttattatcagtctattcaatgttcccgtgttgtaaatataaaatgctatttgccactttaacgtatattatcttaataagtagcaacatttaatagcttttagtcattaaacccaagtcattattcacgcttgggttttattaggcgtaataagaaattctgggtatcagtgacaagagcacagttgaaaaagaactggctttgtagttggagaattgtggattcagaactcagatgtcttgtttattaacagtggatttaggtttctgtttttctgatgttgaagtggagataataatgacattgtagaactgttctaaggattaaatagctatatataaggtatgcatcacataaaagttgattttttttttattgcttccagggccataaatttacttctccctctagtttgggtactgagggagaagggagggtgaatgatgtcctgcagggaccctggggactcttctgattgagggaaatggggagtggtgagccctgaggattgtgggagttccagttcaggctaggaaaagggatcccagtgtgcaagtataattttgcaatgataaaggccatcatggattgtctatgccagggatcagcaactgtttctttggttttttgtttgtttgtttttgagacggagtttcaatcttgttacgcaggctggagtgcaatggggcgatctcagctcaccgcagcctccccctcccagattcaagcgattttcctgcctcagtctcctgagtagctgggattataggcacgcgccaccacatccagctaattttgtatttttagtagagacggggtttctccatgttggtcaggctggtcttgaactcccgacctcaggtgatctgcccgccttgacctcccaaagtgctgggattataggcgtgagccactgcgcccagccagcaaatgttttttatagaggaccaaataggaagtattttaggctgtgtggcccatacaatctccattgcaactactcaacttggctatggtagctttctgaaagtagccatagtcagaagtaaacacatgagcatagctgtgttccattccagctttatttacaaaaacatatgggcgggccagatttggcccatgggccataggttgcaaactcctagtctgttctatctttcgtttttaagtctggggaggccaggaagctcctaaggccatgaaggcagtctgctttggataatgtggtctgtcccctttggatggtgagaattgagggaagagaatctactctgggcaattctgaacatcccagccttgggcctagatcagtatcctcatagtggggattggcccagaactctcctgctgaaatattggtcatgtgttctaatgcaggataacctctgcactgtgtccatcctcgtacagccaggttcccttgctgtggtgagtgtgtcggagggaggtgagggaagtgtaggggaggtatttgcaagcaacagtggaaaataaaagattattaatttatatcatattgttacctctgaggcagacctagtctcactgtctcatttttttctcctctaactcaggcttctcagaactttgcttctccagcagaataatcctgcggaagactgagcagttcttgtgagtgtaaaaccatggcccatgtaagtcacagtttctctttcctttttagattattttgtttttaaagatcatgtgaacattttcactctttatgctgacacttcctaagaattttttcttcatccccacatttccaagctcctcccatgggccccctctcttttctaaccagtatccacatgcacattgaccaactcattcagggtactcagtctctgtctagggcagagatggaacagacatgaagttcctagagggggaggtactttaccatcctttgtcagatctgaggtgtaatgaaaccaagaatggaatcatttgactacacgtaggaaagcactgcagttttccacagatcctgtgtctgtagataaatgcagtttaatattgattggcctcagtttcagtatgtggttggggcctgcttatagagaggccaggggatctttcctgagaatctctgaggtgaaaacccatagtaagacgcattttgtggttaaacggaatgtgctagtcttgacatcagtatgattctggttcattacatcaatattcttaatctcaagaaaaaagaaggtgtgtagtacttataagaaaatcatccagatacataaatattagttaattgtattctcccagatttgcagtgaggtactatggcctcgaacttctgagttcaccactgtactccagcgtgggcaacagagtgagatctccgtctcgattgatcaatcgattgatcgatagatagatagatagatagataaacttaaaggaaaaagaggatataggattcttttttatgtattaagtggtttttcttaaagtatttattattaagtaataatttattgagaatttttgaggtagaaatatagtttatttgcttgtatccactgtttaattgaattgggaaacatttatttgttcccagaaatgttttgagtagttaaagaaccccataatatacaggaaattttgcatatagtggctggattcttcaagaaaatgaggtgactctgctttagaacacctggttcctttcttctatctttatcataagctttcagccccagcctagagtttagtatagtaccccttgctgcaatgaaaccttttatctccttttcttctttttaaaatacttgttctgtaatttcaccagtaatatgttggtttatggtttcaggcattggtgacgttcagggatgtggctatagacttctctcagaaggaatgggagtgcctggacactacccagaggaaattgtacagagatgtgatgttggagaattataataacttggtctcactgggtaaggtcacctatgtcaaataatgtagactctgttatctgaaatagtagctttctcttccacaaatttaggactaattattaagaaactagctgaatttcttctctcttcctcaaggaatggactgaactttgatggtttgtgaatggcacttccactaaatgctttcattttcaccatacctcactgagcctcatgaaatgttccttaatccattactgtagttacttcttccttaatagttaagagactggatttgaattttggggcatttactccaaagccaatgtcaatgaaatcaggtttcacattgcatttgagctcagaattgctatggatgctctgttatttggtaacatgcctataaggataacagccctacccagggtctacaatttacatgtcatggttcagaccaataacattgatttaaaattaaagtgaatgcattctacttcctaaaacaaatattttctcttactgatttgtgattgaaaattttacctattggacattatgctcagtacctgggtggtgggatcaaatgtacctcaaacctcagcatcacacaatatccccaggtaacaaacctgcacgtatggccctgtatctaaaataaaagttgaaattagttaaagtaaaataaaatttattaacttagcatctaactttaaatgaatatcttagcaagaacctagaaatattttaggaagcttcttgttttgctctaagtaaattaacaacaacaaaaataataatagctaatagagtgcttactatataccaggcatcattctaagtactagctacaagatacaaaagaaaaaaagaaaataaaaggtactacttttattttcattttacagatgaaaaaactgaggcccaaataatttaaccagtttgtttacaatcattagtcaataggtagtagagtagaatttggacccacatagtctggcttcagaggctatgccctcaataactactgcctctcaatagagccagtctgtatgagttttaattccaaaatgaattaaaattctcctagatgaattttaattcccctgcccatcaagtttctttattctctgggatcctgaggttacactaagttgaatattctttaatcctgtcagttttttccgaagtcttcatcgaaatcatgttgatccatataaatttaaccaagtctcaaaatgtttctgaatgtgcaatgttttatttctatatattcttttatttctttcttgtaagcaggatattctggctcaaagccagatgtgattaccttactggagcaagggaaagagccctgcgtggtggcgagggatgtgacaggaagacagtgccccggtgagttgagagttcatcaggcagatggaagccctcattgccagtcacggccagctggtgagggagcatatacaggctttgcatgctgtttagggagttactctcagaggcctcaggcctttggagtaaaggttaagacagggaagaaaacagatcatctgagcatgaactatcaaaagaacctcatcttggctcctacttaccacctgtctttgtttttgtttcccctcgtattactctccatttcagtaaagggaatgctctttcctagtgcaatcaattgcttcctatcttttctccattgacatgtgtgcttgtttctaatgcctaaaagttcagtctttcacatattcagcatatatttaccgagtgctcactctgtgccaagtgttatcagtgccttggtgaataaggccaaaacctccctacactaatggaattaacattgtagtagcagagatacatagtaaactgtaaacaaatgaatatataatattaaataatgatgcatgctatgaaagaaacctatgaagggtaaagagatagagtttgggcaggtttaattgaggtgggctgcccagggaaggctcttcgaagagagaatatatgtgcagagatgtgcagtataggcttaggccatgtgaatatctggaagaaaataattccaagcacagcagagaagtgagctttgtgtgtttgaagaactggaaaagctcagagcagattcagagtggggaagagtaactaaatatgaatttagagctgagcaggggccaggtcttatatggttctgtttatcatagtaagaaatttggatttttcttttccaagagtgattgaaagccataatcaaaaatatgtttttaaatgatcactgtagatgctctgtgaagaatatactaaacaggggcaagattggaagtaggaagatcagttatcaggctatttcagaagtctagattagcagtgaaggtagcttggattgggatggtagtggtgaggggtggtaagaagatgctgtattcatcttatgatttgaaagtagagctaacagacatgccatggggtatgagtgaacaagaaatcataggtgaacaagcagctaagtgtatataatttgctgagatggacatatgggaaagatagcttggaagatggaaatagagtcctgatttaggtatatatatttaaaatgcctacttgtcatcaagatcgagatgttgaacagagatggtaggatgagttatattaacttgggtgtccagccaatcaactgactggatgagatcacttagggctgatctgacctactacctgtttttgtaaataaagttttattgaaacgtagccatacttaattatttatgtgttgtctatggcagagttgagtagttgagacagaagtcatatggctcgcagtgcataagatatcgactgtctggtcctttacagaaagtttgctgattccctccctttagcgaatgagtttcatagaatgaagggagccagaggagaaagagactgaggcccagggcactctattcagagaaggaagaggaggcagcaagtagattgagaacaagtagcctggagagtggtaccaaaaaagtcaaatgaagaaaatgtttcaagtggaagggagtagtcatctgtgaggtcaactgaactgtaaactgcctataggatatggcaggaaagaagctggtggtgaccttgtgttaagaggacaaggtttcagtggagtcagaggtgaaaaaagcctgctagatgtggctgaaataaaatgggaggtgaggcagtgatgacagtgagatagaaaacttttctaatgggaaatctgttaggagggaactagataagaggttagtagctagaagaggatatgggatgtaaggagtcttttttttttttttttttttgagacagagttttgctcttgttgcctaggctgcagtgcaatggcatgatctcggctcactgcaacctccacctcccgggttcaagcaattcccctgcctcagcctcctgagtagctggtattacaggcgcctgccaccacgcctggctaatttttgtattttagtagaaacggggtctcactatgttggccatgctggtcttgaactcctgacctcagatgatccacccatcttggcctcccaaagtgctgggcgtgagccaccatgcctggccaggagtctatttcaagatgtgagattttaagatgaaaatgattctatagaaaggggaaaaattgtagtagagggaaggataattatggaaattggaggacaaggaggtaggatccagtgcacaagaaaaatttagagaactatagatacgacaatggatataggtgggttgattgatgtggtattatgtatttcttttcaatgcttcatttttattagaggaataagggagatcatcagctaagaattggcaggagggaaaggagagttatgtttgaggtgaaagatgtaaatatattttgaatactggtgttcagtttacttgcatctcaatagctcgttcactttttattttctgttaatcaggagttaataataataacagttaacattgattatttactgtataccagatttagtcatttcacaatgtatatattcttcaaaatatgttgtacagagtaaatacataaaatttatctgtcaatgtaaaaaataatgcatttttaaaactatgaagaaaaggctattaagttctatatagtatgttgattcctctatatcaagccaaattctgatttgtattttatttgcagattttttttagttgaaattcttgggctgtatataatcagatcatttgcaaatcatgatagtttttcattctttcttaaaaatgtttgcctctaaagttcttaattctgcttagttgttttgcttatcataattttataaaaaggataagataacttttctttttgctcttttctcgagtagctaaactaactttaaaattatctgttctttaaaactttgatagacgtctatgaaattgtttgcaaggataggtgtttcacaatggaatttcatttgcttaggctttttatttcttctgtggtcaatacaggaaattaatagtttccttaaaattttttattctggaatatacaggattattttgtttagagcattacatagagctttggaaaatagccttactttttttttttttttttttttttttttttaaggcggagtctcgctctgtcgcccaggctggagtgcagtggtgcgatctcggctcactacaagctccgcctcccgggttcacgccattctcctgccttagcctctggagtacctgggactacaggtgcccaccaccacgcctggctaagtttttgtatttttagcagagatggggtttcaccgtgttagccaggatggtctcgatctcctgaccttgtgatccgcccgcctcggcctcccaaagtgctgggattacaggcatgagccaccgcgcctggccagccttactattttttttcaaatcagctttattgagatatgatttatatagaataaaattcattaattgtatctgtttaattattttggacaaacacgtgagtcttgtaatcatcaccacttcagtcaagatgtagaacatgtctatcatgtcaaaactttccattatgtttctttacagtcagtacccttcccccactttcagctcagcccgtgacaggcaactaagttgccttctttccctaattttgtcttttctacaatttcatatcaaataaatcagaatatgcagtattctgtgtcatactacttctacttctgatatttatgcgattcatccaagtagttagaagtctcagtagttaattcctttttcttgctgaatagtatttcatatctgcttattagttaacagtttatgaacatctaagttgtttctagtctttcgcaggcatgaataaagctattatgagtgcttgtttacaagtctttgttttaatgtatgctttgttacctcgggttaaacacctgagggtgggattcatggattatataagtatatataagaaactgggctgggcgcagtagttcatgcctgtaatcccggcactttgggaggctaaggcaggcggatcgcttgagcccaggggttcaagaccaacctgggcaacatggcaaaccctgtctctactaaaaatacaaaaattagctaggcatggtggtacacacctgtaaaaactttatttaaaaaaaaagaaactgggctgggtgcggtggctcatgcctgtaatcccagcactttgggaggccgaggtgggtggatcacgaggtcaggagttcgagaccagcctgaccaacatggtgaaaccccgtctctactaaaaatacaaaaattagccgggtgtggtggcgtgtgcctgtaatcccagctacccgggaagctgaggcaggagaatggcttgaaactggaaggcggaggttgcagtgagccaagatcacgccactgcactccagcctgggcaacaagagtgaaactcttgtcgcaaaaaaaagaaagaaactgtccaaagtggctatattgtttggcattcccactagatgtccaatagctccacattgttgccaacctgttgtattgtcagtcattttaatcttagtcattttagtggatgtgtaggtgtatctcattgtgattttaatttgcatttaactaatgactagtgatgagcatattttcatttatttgtcattcctttttctcctttggtaaaaagtgtctgttcagaaattttatccatcaaaatttttagcaattttattgaggtataatttacataacataaaatttactcactgtaagtgcacacttggtgacttttagtcaatttatagttaggcaggaatcatgacaatccagttttagaatacttccatcacccccaaaacttcccttgtgcccctttgcagttaatcccttcttcaatctacagctttaggcagctactgacctaccttccatttttgttgattttccttttctgaacatttcatataaatgggatcatgcaatgtacagtcttttgactctggcttctttaacttagcataatgttctggaggtccatttatgaagcagcatgtatcagtgatatattctcttttattgctgaatatgttctgttgtagggatataccttattttacttatctatttaccagcgatggacatttgtattgtttacagtttggggctgttatcaataatgctactataaacatgagtatacatatcattgtgtggacatatgtcttaattcatcttagttggattcataggcatggaactgctgggttatatgacgaatataactttcactttataagaaactgccaaaatgtgttccaaactacctatatcggtgtaccttcccaataacaatgcatgagggtttctgtttctctgtcttctctccaacacatgctattacctgtctttttgagaacagccattccagtgtgtgtgtagtggtatctaattgtggttgatgttgagcaattgcttattagctattggtacatctttggtggaaagactgttcagtgttttgcccattcttaaaattaggttgtttgtgttattattgagttgcaagagttttaaaaatatattctgaatataagcattttatttacatatatgatctgcaaatactttctcccagattgcggtacatggcatgtcttttcattttcttaatcttattttttgcagtacaaatatttttcattttgatgaagccaaatgtatcttttttttcttttatgaattgtgcttttgtattgaagaactctttttctcatacaaggacacaaaaattcccattgatattatccattttatcttcttgatttgtaagagttctttatatatcttataatcaacttctttatcagatatatatattttgcaatattttattagtttagatactagatatatattttgcaatattttactagtttctggagtaactttctattaattaacaaactttatttttaaaatcagttttaggtttacaggaaaatttagcagaaagtacaggtttcctgtatactctctgtccccaaacatacacaccctccccaactaccaacaatccacattacagtggtacatttgttacagttgataaacctacattgacacatcattaccacccaaagtccacagtctgcattaaggttcactcttggtgttgtaaattctattaactttgaaaaatatataatgatatgtatccacaattgcagtatcatacagagtagtttcactgctctaaaatttctctgtgtttggcctagtcatccctctctccaccctaacctttagaaaccactgagcattttactgtctccatcgttttgcctttttcagactatcatgtagttggaatcatatagtatgtagccttttcagattggtctctttcacttagtaatatgcatttaagtttcctcaacatctttttgtgatggcttattcttttagcactgaataatagtccattctctggatgtaccacagcttaatcattcacctactaaaagacatcttggttttttttaagtattggaagttttgaataaagctgctatatgcatttgtgtgcaggtttttgtatgaacataagctttcattttatttgggtaaacaccaaagaaatgattgctgagtagtacgataagaataggtttagttttgtaggaaactgacaaaatgttctccaaagtggctataatatttttgcattcccccagcaatgaatgagagttcctgttgctccacatccttgtcagcctttggtgttgccagtgttttcgattttggccattctaacaggtgtgaagtggtatctcgttgtttttaatttgcagttctctgacattcctgatctctggtttggtgtctgacattaatttggagaaattctcattcattgttgcttcatatattgcttcttttcctttctctcattttcctccttctggtattttcatcatgtgtatttacaccttttatgcttacccccagagttcttggatatctgttctgtttccttcagtattttttctctttcttttcagtgttggaagtttctcttgtcacatcttcaagtgcagagactctcagctgtgtccatttactagtgagcacatcagagccattcttcatttctattacagtgtttttgatctttagcatttctttttgattctttcttagaatattcatctctctgttttcattatccatctggatgttgtctattttttctattaaagcccttaacacatttcttatagtcttttaaaattcctggtctgataattccaacattcctgccatatctgactctcattctgatgcttgtttagtctcatcaaagtgtttctcgccttttagttttccttctaattttttgttggaaggtgaacatgatgtactgggtaatgggaaacatagtaaataggcctttaggagtgcagtgataaggtttccgcagtcccagaattaggtctcagtctttcggtgcacctgtgccacctgatggaccttaaccagtgcttccagttttttccccatcgctaggtgtgacaggatagcttagagggctgagttgggtattttcattcctctatatcattaggctctaataaaaccccagcaggttatgatctatctacttgagaaaataccctaacctcaggtgatccacccaccttggcctcccaaagtgctgggattacaagcgtgagccactgcgcccggccagtatttagatttttttaggctcttttcttatttagattgccaccctccagctttcatttaacttatctgtgttaataagattccttgacacttctagtctcccagccatctcttcatactattcagttactctgttctccctaaaattgttgagtttctttgttcattttttccagaaaccattcaacatggcacatacctgttacaatatctatacaaatcatttaaatacttctctatcaagtataggaatggttggttttagatgtaagagaacagaagagatatcatctgagaaagcttataaagaaagtacagtgggccgggcacggtggctaacgcctgtaatctcagcactttgggaggccgaggtgggcggatcacaaggtcaggggtttgagaccagcctggccaatatagtgaaaccccgtctctactaaaaataccaaaaaattagtcaggcgtggtggtgggtgcctgttatcccagctacttgggagactgaggcaaggagaatcacttgaacctgggaggcagcggttgcagtgagccaagatggtgccactgtactccagcctgggcgacagtgcaagactctgtcttggggggcaaaaaaagtagagtggccgggcgcagtggctcatgcctggaatcccagctctttgggaggccgagacaagtggatcacctgaggtcaggagtttgagaccagcctggccaacatagtaaaaccctgtctctactaaaaatacaaaaattagctgggtttggtggcatgcacctgtaatcccagctactcaggaggctgaggcaggagaatcgcttgaacctgggaggcagaggttgcagtgagccgagattgtgccactgcactccatcctgggtgacagagtgagactccatctcaaaaaataaagaaagaaagaaaaaaaaagaaaagaaaaaaacagtagagtgagcatccagtaggtggctgaataatagtaaaactcagctgtgtaaacatacatctctttgcacaggaggcagtgaacaacaggattggaaacatctctgtttaactggatagccatttaaaggatgagtaggcaaaacaagggctttttcattttatacatttggttgaactaccttggatttacttttgttctgatctgtaaaggaagtaaggtaggaaagagtgcatttaatcactgtaataaggtgagagagattagagctcctttgtaattgttacaaaaatataaaaattaagtgattgtcctgatattcagctgtcctatacatgacttatctgtcattcatcatcataatttcctttaagacaatgattaatttattgtacagtcagttgtttaatgcctgctgtatgctagtgggtagttattcactgttgaatgaaataaggattacatcttcctttgggaaggtttagggatcagaaaatcaacaaaagagcaaaaagaaaaatcagtggatatgcgtttgaaaattgtgaaatgaagaaatgaaacatgatgctggaattgagaataaaggacatagactgccttacagtcggtagggcaagcctttctgtgtaagagatatttaaccaaccattaagaatgagaaggagttggcctttcacagagccctggacagattatttttaggagatgaaaaatcccatagaaaactatatgaaatgggaaatgttatgacacaatcgaggagctgaatagaagcaagtcataataagagggagtaaggaggacaatgtctttgaaagaggtctttaggtaaccaaagaccatattatattatatggtaacatgtttggattttattctaagagtaaagaaaaactgttaaaattgttaagtggagattctcaaactttgatctatatcagaatcatctagtggagttattaaaaattcagataccaaattactcctgtagatttggttcacttgacttgtgtgtaactaaatagcagtatttgtgataaagttccccagatgattctcatacacaataaaattttagaaccactgacgtaaataaactatttgccatatcaccacaatcttatataatcttttttttttttttgagacagagtttagctcttgtagcccaggctggagtgcaatggcgcaatctcagctcactgcaacctccgcctcccaggttcaagtgattctcctgcctcagactcctgagtagctaggattacaggcgcctgccatgatgctcggccaattttgtatttttttttttaggagaaatggggtttcaccatgttggtcaggctggtcttgaactcctgacctcagatgatccacctgccttggccttccaaagtgctgagattacaggcatgagccaccgcgcccggctataatctctcattttctaagctcatgttgcctaatttcaaattatataactttattgaaatattctttaagccactgacttctagtaagaaccgttttcactttgtttcctattttgaaaatgtaaactttatgttatgctggctacaggaaaataatttttgtttgcttttatgttttctttcaggtttgttatccaggcataagaccaagaaattatcttcagaaaaggacattcatgaaatcagtttatccaaagagagtataatagaaaaaagtaaaactcttcgtctgaaaggatccatttttagaaatgagtggcagaacaaaagtgagtttgagggtcaacagggacttaaagaaagatctatcagtcaaaagaaaatcgtctctaaaaaaatgtcaactgatagaaaacgtccctcttttactctgaatcagagaattcacaatagtgagaaaagctgtgactcacacttggttcaacatgggaaaatagattctgatgtgaaacatgattgtaaagaatgtgggagtacttttaataatgtctatcagcttactctccatcagaaaattcatactggtgaaaaatcctgtaaatgtgagaaatgtgggaaagtttttagtcatagctatcaacttactctgcatcagagatttcatactggtgagaaaccctatgaatgtcaagaatgtgggaagacctttactctttacccacaacttaatcgacatcagaaaattcacactggtaaaaaaccctatatgtgtaagaaatgtgataagggtttttttagtagattagaacttactcaacataaaagaattcatactggtaagaaatcttatgaatgtaaagaatgtggaaaagtttttcaacttattttctactttaaagaacatgagagaattcatacaggtaagaaaccctatgaatgtaaggagtgtgggaaagcttttagtgtatgcggacaacttacccgtcatcagaaaattcatactggtgtaaaaccctacgaatgtaaggaatgtggaaagacctttagacttagtttttaccttactgaacacagaagaactcatgcaggtaagaaaccttatgaatgtaaggagtgtgggaaatcatttaatgtgcgtggacagcttaatcggcataaaacaatccatactggtataaaaccttttgcatgtaaggtgtgtgagaaggcttttagttatagtggtgacctcagagtacattctagaattcatactggagagaaaccatatgaatgtaaggaatgcgggaaagcctttatgcttcgttcagtccttactgaacatcagagacttcatactggtgtgaagccctacgaatgtaaggaatgtgggaagacctttcgagttcgttctcaaattagtctacataagaaaattcatactgatgtgaagccctacaaatgtgtacgatgtgggaagacctttagatttggtttctaccttactgaacaccagagaattcacactggtgaaaagccctataaatgtaaagaatgtggaaaggcctttattcgtagagggaatcttaaagaacatctgaaaattcattctggtttaaaaccctatgactgtaaagaatgtgggaagtcctttagtcggcgtgggcagttcactgaacatcagaaaattcatacgggtgtaaaaccatacaaatgtaaagaatgtgggaaggcctttagtcgtagtgtagaccttagaatacatcaaagaattcatactggtgagaaaccctatgagtgtaaacaatgtgggaaggcctttagacttaattcacaccttactgaacatcagagaattcacactggtgagaaaccctatgagtgtaaggtatgtagaaaggcctttagacaatattcacatctttatcaacatcagaaaactcataatgtaatttaatataagaaaaggtttccatgtcatgctctatttatagaatatcaaaatatttatggccagaagttctgtcaatgtgttgatgtttttttacacatattaacttaataaatgtatgagtcttaaatacctcttagttctcattaaatttaggaaaattcacactagaaaataaagctgttaatgtaacagttgtggaaaagtgttctagcaacagcatatacttatcatcattgcctttccactactctactatctgtgtgatattagacaaaatatttgcttcttggtacctcagctgtaaaatgaaacacacctaaaagtgtggttgtttccaacatgtataatacagcaacaactatctggcccaaactgctttggattaatattggatattactgtttttattatcatcaacattattattagtggatttcttaataggaagatgcaatggagatgacaaatttggaaaaaccactcatcacttacatttcatgaagtacttctttgataaaatctgttatgggctgaatgtttgtgttcccgtaacaattcctatgttgaaacacgaatcccaaggtgatggtatttgaaggtagggcctttaggaggaaattaggtcatgagggtggagccttcatgagtggaattactgcctttataagaagaagccaaagagccagctagctctttcaaccacatgaggttacagcaagaagtcagcagtctacagtgcaaaagagggccttcaccagaacccaagcatgctggcaccttgaccttggactttcagcctccaaaactgtgagaaataaacctcagttgtttataagccactgagtctacgatattttgttatgcagcccagataactaaggcactccattagaatataaataaaatgtaaagatctaaattcagacctcattgcttaagttctaaaattaaagatgaagagaaaccctaaggatgtagtgagtgggaggaccttagaatgtagctgttgaagcatcaaagagaggtgtgagggaatttacccataataatacagaaattaaatggatagaaaaaagaaagatctggccatggtggctcacgcctgtaatcccagcactttaggaggctgagatgggtggatcatctgaggtcaggagtttgagaccagcctggccaacatggagaaaccccgtctctactaaaaatacaaaaattagctgggtgtggtggcaggcacctgtagtctcagctactcgggaggctgaggcaagagctgaggcaagagaatcgcgtgaatccaggaggtggaggttgcagtgagctgagattgcaccattgcactccagcatgggagacaagagcaagactttgtctcaaaaaaagaaaaaagctgtctatttagaaagtttttactaattttattatgaaaatgctctgagacacagaaacatagaatgcattctataatgaacacccatttttaccttccacctagatttgaaaatgtatattttgctttttctataaaatacatttttttgcgataccatttgagagttaagttataaacatcatatcattttgcccctaaatcagtttgtatctcctaaaagtaatggtaatacatatacccaaagtactaaaatcacaccctaaaaattaacaattccatagaatcttataatatccattccatgttgaaatttccataattgttccaagaatatatttcatagatatttaacaaggatttactctccagatcatacattgtaacattttggtggttctgtcactttttttttttgagacggactctcgctatgtcgcccaggctggagtgcagtggcgtgatctcggcttactgcaacctccgcctcctgggttcaagcaattctcctgcctcagcctcccgagtagctgggattacaggcgcctgccaccacgcccggctaatttttgtatttttagtagagatggggtttcaccatgttggccaggatggtctcgatctcttgaccttgtgatccacccaccttggcctcccaaagtgctgggattactggggtgagccactgcacccggcctgctctgtcacttttaaactgaacagcccctcatctttatgtcattttattggcttttagaagagtccatcacagttgtcgtagaatatcctggattctgggtttgtcgtattttatttctgcataatgttgttcctctttttcctctgtctccaaactgaaacttaaacagcagcttgatttgcttctggtcaaacatttttagcaagaatacttcataggtataatacagtctgtacacacaggaggcatataatggcaggttgtccttttattagtgatgctacatttggttaaggtagtgactgccagatctctccattgtaaaggtatgttattttctttgcaattagtaagtaatttggtgataatttgcacctcctcttacaaatttacaatcatctacatgtataatacaagtcatggattaaactggaaatcaaaagttaaatattgatttaacagaaagcagtgatattgaaatgcctacatattgaaatctgtaggatgtggccaagactctactcagtggtaaattaacatcccttaatgcatacagaaaaccacgatttggggatagaacattttgttctctgtatcctcaacacgactgtgacgccttttgcatagtaggcacttgataaaactcgggaaaaaataagtatttaactcaagaaacaaaaaaaggtaccaaataaagcagatgctaaaagaaggaactagttaatgcaattaaaattagaaattaagtaataagcagattatagacttattcaatttttccaaatccagtaaaaagaaaaaaacgatgacacagttataagtgtcacgaatttaaaaaggacattaccagagatatcgatgtcatcccagctactcgggaggctgaggcaggagaattgcttgaacccaggaggcggaggttgcagtgagccgagatcacgccactgcactccagcctgggcgacatagcgagagtccgtctcaaaaaaaaaagtgacagaaccaccaaaatgttacaatgtatgatcctgagagtaaatccttgttaaatatctatgaaatatattcctggaacaattatggaaatttcaacatggaatggatattataagattctatggaattgttaatttttagggtgtgattttagtactttgggtatatgtattaccattacttttaggatgtcaaattataagaaagtagtatcatttcaatgtatataaaattccagagctaatgaagtcttttctagaaaatgtacttcattgaaatttacacaacataatcatgcttgagtgaactagtaaatggaaaacgtaaattcagcttaagctatagaacaagctagaacaacacagtctgctagcacaatctgttttagtttaataaaaacttcaaggataattgttaccagaattttcccagctcatgatacatggctgacataatccaaatgataaaactagagagaatagttactaaaaaccaaaatttaaatgagtcctaattaaagagaaaaatcaaaatgctaaataaaatgtcagcaaaatgatacaatttttcagtaaatatatctgaaatgtgcaggcactggaatattctggttctatacatatgcagcttaaattatggaaaaagaattgctacagtcctattatcatctagattcattatcatatatatatatatacacatatatatatattagccttactatcactgatacctcctgatttcatcaatgctaaaaagccccacccaaatctcatctcaaattataattcccacatgttgggggagggaccctgtgggaggtgactggatcatgggggtggttccaccatgctgttctcatgatagtatgttctcatgagatctgatggtttaaaagtgtttggcagttctccacccccctctctctctcctaccaccatgtaagacatgccttgcttccccttcaccatgtgctatgactataagtttcctgaggcctccccagcaatgtggaactgtgagtcaattaaacctctttcctttataattactcaatctcaagtagctctttatagcagtgtgaaaatggactaatacaatgtcttgtgaaaacgttcattgatatttttagtaagataagccttgtgccagtatcaaagcattttatatttgatgggatatggtgtatgtatatatacacatgcacatacacaaaccagacacaaagacttatttgaatttaatgttcacaagaatttcctgaaaacaactgtcagggcaaaggcattttaataatgttttcatttaattttttttttttttttgagacagcattttgctctttcacccaggccagagtgcagtggtgcgatcttggctcactgcaacctctgccttctggtttcaagcgattctcctgcctcatcttcctgagtagctgggattacaggtgcctgccaccacacccggctaatttttgtatttttagtagagacggggtttcaccatgttggccaggctggtctcgaactcctgaactcgtgatctacccgccttggcctcccaaagtgctgggattacaagtgtgagccactgcagccagccctaaatttttataaatggtattgggactattatatacacatgcatatacacacacacatataaacagctcccgaaaatataaacaacttttggtgaattaggaacaatggagaatacctgaaatagaggaagcactggtattagatcatctaagggaaccagaaaacaaaacacaagagtgtgcactactttgaaaggtgaatgtgacataataagggtggcctgggcctagggtttgtcacaagaagcaaaagtggggacagtgagattgtcctcacaaccaatagtgagattggttgcttggggaagtaaagtgatttaacctggcacatcaccttcccttaacccagttagcaagccctagtccctgcttccaggaggaggaggtgaggccactgactggtattgtcctaggggaaataggagcatccctatgcctggggctagcaggccaggcatgctgcagcacaaaaaacctgccactcctctgtctctaaaaacaagtcagagtgcacatcagagcagcacatcctattcctgcactgaagcagactacatccaaagtactctccactgtgaaactaaacacatatcagaattaccaaacatttccaaaaaagctgactcccatataatagagaaacaatgctgatccaatgggaaatactataaaggcagtagtagaataaatgaaacgggagttttgtttaagtacgaatattaagagtaagtaggaatagcatcctcaaaatgatatgatgggaaatagcaaatctctataacaaaatcaactagagattacaaaaattacttaaatgtccttgtggaaataaaatctttaatagagggacttccatttctgggaaaatggaagagatgtccttttccctgttcctcccactaagtacaactgaaaactctgaacgttatatataaaacaaacacaagatgactctgaaaggtggagagaagagagcagactggctagggaccacaggacccaagaaatgacatagtcgtgaagttccatggactttatttatatcccagacttggagctaaagaagctggcaaccctaaaatgccaatattcagagatggaaaaaaaaattctaaagaaaagcctactctgtatagctaaagaaacaggaaagggagtctagcaagacaggacactattattttattttattttatttattttttgagatgagtctccctctgttgcccaggctggagtgcagtcatgtaatcttggctcactgcaacctctgtctcctgaactcaagcaattctcctgcctcagcctaccgaatagctgggattacaggcgtgcaccaccatgcccggctaatttttgtatttttagcagagatgaggttttgccatgttggccaggctggtcttcaactcctggcctccattgatctgcccaccttggcctcccaaagtgctgaaattacaggaatgagccaccacgtccagccaagacaggaaacttttaaataaccccttacttcagccaaatgccacagaaaaatctgtggccccaccaccactcttaacaccaaaggccaagtggagagtctagacttttacctttataggctgtaacaaggtgtccaaacttcctgaccaagtagtctcagaaaaagcccagtgtgaaaccagggtctttcattttcatcaggcaataatgagcccctcctgtatggtgtcaatgccaactaaatggagaacgtggactttcatacctaatgaaaatattgttcaggaaagaaggagaaatcaagaacattctcaggtgaaacaaagctaggagaatttgttgccagcagacctaccataaaggaaaggctagctgggcgtgggttggctcatgcctgtaatcctagcactttggcaggctgaggcaggccaatcacttgtggtcaggggttcgagaccagcctggccaacatggcgaaatccccgtctctactaaaaatacaaaaattagctgggcatggtggtacacacctgtagtctcagctactcaggaggcggaggcaggagaatcgcttgaaccccagaggcagaggttgcactgagccgagatcgtgccactgcactccagcctgggtgatagacagagactctgtattaaaaaaaaaaaaaaagaagaagaagaagaagaaaaagaaaaaagaaaggctaaagaaaatctgagaacagaaattaaatattaaacaaggaatcttggaaaattaggaaggtagaagaaacacagcaaaattacgggtaatttccttatcttgagtttcctcaattatgtttgacaactgaagcaaaaattgtatcactcttaggtggtttccaatgtatataaaagaaatatttaacttgattataatttgggatgggtaagggaagggaaggtttctacacctaattcaaactggaaaaatgtcaaaccagtagactttgtaagttatgtatatataacgtaatgcctagcaaaagtgtgcaatcttttggcatccctgggccacattggaagaactgtcttgggccacacataaaatacactaacaataacgatagctgatgagctaaaaaaaaaaaaatcataaaacaatctcataatgttttaagaaagttcacaaatttgtcttgggccgcattcaaagccttgctgggctgcatgaggcccacaggccgcaagtcagataaacttggctacagctactgctaaaaaaattgatacaagtgatccacccaaaaacactataaataagaaaatggcagaggaggaaaccaacaactcatcccttcacaaaagcaatgaataaacaaataaaaacttacagaatcaactcttgaaaaatttagaaaccagagtaatctacttttttttttgtttgttttttgagacagagtcttgctctgtttcccaggctggagtgcggtggtgcaatcttggctcactgaaacctccacctcccgggttcaagtgattctcctgcctcagcctcccgagtagctgggactccaggcctgtgccaccacacccagcccagtcagggtttcaccatgttggccaggctggtctcgaacttgtgacctcaggtgatccacctgcctcggcttcccaaagtgctgggattacaggcatgagccaccacacccagcccagattaatctttttttttttttttttttttttttttttttttttttctgagacagagcaagactctgtctcccaggctggagtgtactcactgcaacctctgcctcccggattcaagcgattctcccgcctcagcctcctgagtagctgggattactggaacccgtcaccaagcctggctaatttttgtattttttgtagagacagggtttcgctacgttggccaggctggtctcaaactcctgacctcaggtgatcctccagccttggcctcccaaagtgctgggattccaggcgtgagccaccacgcccagccagagtaatctatttttgaagggcttcaaggtggctgactagatccatctagtactagcctcttccacagaaaggaaccaaattagcatatagataatcacactttgaatagatcatctgagggagaacactggaatgccacagagaagtgatgggaaaagttgaaagaaggagaggcagcctgcttggccaggagagtctgggagcctggagaggctccctaatgcagggaaacggttaagtgagagacccccagtggtccacattcccatcaatggctaatcttcgccaagggagaccccctctaccctcatgagccctgagactaacacaggtagctgcctgaagactgcacaagggcattgctccagagagggagtgcattttgggtcccacaaacccttgagtcctaagcagctgctgcatggcaccattttgatagcccaatccccaccagaatgcatcctgccctggggcccaacaggccctgcatctccacatccctggaaccccatcacatttgccacccatagctatcccagcagggatgaggcaggagccactggcagtgaccccacttcccacaagcagagtggtggctgcacattttcaggagcactaaggacaaatccactgcctgcattggccaccactgtaggcttctgcaggaccaagaggtgagcaaaacacatttcccccagctccctatggctgctaccatttgaaagcaactgtgatgtccccaatagcatggttgtagcacagctgctactccccctgcccctccgtgctttccattggtggcctggggataaccccatccctgcctaccacagtcagcacctgcaagcaccaccagatggctcaaggacagtccctggcctgagagtgccatccaggggtctggggatcgcccagcccagtccacaaccgttggcacctgagcactcctcccagggtctgaggtcaggcctacacaacctgccactaccaccacagctggcagccacctgcacacaccacctgcagacctggggacttgtctgcccagcccattgtagccactgccaacaccagcatggactgcataggttccagaaggttgtcccaccactgctactggcataggccacacaattcagctgcacagggggttagggacccacctaaccacccagcccattgctgccactcctggcactcaagcaagccacctgaaggcccaagaattggccacagtggctcatgcctgtaatcccaacactttggaagaccaaggttgttgtgggaagtcagggaccccaaacggagggaccggctgaagccatggcagaagaacgtggattgtgaagatttcatggacatttattagttccccaaattaatacttttataatttcttatgcctgtctttactgcagtctctaaacataaattgtaaagatttcatggacacttatcacttccccagtcaatacccttgtgatttcctatgcctgtctttactttaatctcttaatcctgtcagctgaggaggatgtatatcgcctcagaaccctgtaataattgcattaactgcacaaattgtacagcatgtgtgtttgagcaatatgaaatgtgggcaccttgaaaaaacaataggataacagcaattgttcagggaataagagggataaccttaaactgtgaccaccagtgagccgggcaaaacagagccatatttctcttctttcaaaagcaaatgggagaaatatcgctgaattatttttctcagcatggaacatccctgagaaagagaatgcacacctgggggtgggtctctgacctggccccccgggcgtggtcatctcttatggttgagactgcagaggtgaaatagactccagtctcccatagtgctcccaggcttataaggaagaggaaattcccacctaataatttctggtcagaccagctgatctcaaaaccctgtctcctgataagatgttatcaatgacagtggtgcctgaaacttcattagcaattttaatttcacctcggtcctgtggtcctgtgatcttgccctgcctccacttgccttgtgatattctattaccttgtaaagtacttgatgtctgtgacccacacctgttcgcacactccctccccttttgaaactccctaataaaaacttgctgggttttgtggcttgtggggcatcatggaacctaccgacatgtgatgtctcccccggatgcccagctttaaaatttctctcttttgtactttgtccctttatttctcaagctggctgatacttaaggaaaatagaaaagaacctacgtgaatatcggggcaggttccctgatagaggtgagaggagcacttgagcccgggagttcaagaccagcataggcaacatggcaagaccccatctgtacaaaaataatttttaattagctgggtgtgatggctcacgcctgtagtgatggctattcaggaggctgaggtgagaggactatttgagcctgggaggttgaggctgcagtgagccatgattgcaccactataccccagcttgagtcagagtgagatcttgtctgaataaaaaaagaaccaatctgcctggacccctctaacaccagtgccagcatatgctaccgtgggaccaaaagacaggcatgctcagcccactgctgccaacaatggggcctggagactggtccatgtggctggcaacccagtcccaagtaaaacttcaccacagcctacactgacaacagcaccctgagccactgaggaaatcacagaaaccactgacaccgtttgcagttgaagcaatcatacagagactacactacttcatgcacctagaatcaaagacaaggtgcctatccaaccaacaccacagatacatcttcaagaaaaattcctcccctatgaaagcaaattcaaaacattggaagaagcaactattacaccagatgtgaagatctcaatgtaagaacacaagaaacatgaaaaagcaaggaaatatgacataaccaaaggaacacattaattctccagcaaagatcccaatcaaaaagaaatttataaaatctgaaaaaataattcaaaatatttatcttacttttatttatttattttgagatagggtctcattctgtcacccaggctggaatgcagtggtgtgatcatggctcagtgcagcttcgacctcccagccttgagtgatcctcccaccccagcctcaagcggtcctcccacctcagcctccagaagggctgcgactataggcacacatcaccatattccactttttttttttttttttaattagagatgaggttctccttatgttccccaggctggtcttgaattcctgggctcaagtgattctctcccgtcagcctcccaaagtgctgagattaccggtgtgagccactctacccaaccaaaaatactgattttaaagaagctcagtgagacacaagataataatgaaaaacaaaacaaaggaatcagaaaaaaaccaattcaggatattaatgagacattttcaaacagatatcatttaaaaaaacaaattctggagctgaagaattcactgaataaaatataaaatacattcaaaagcttcaacaatacactacatcaagcagaagaaagaatctcagaacttgaagacaagtcttttgaaataaccctgtcagacaaaaaaaaaaaaaaaaaaagaatttttgaaaatgaagaaaacctacatgacatattgggacaccaatataggagaacaaatattagaattttagatgttccaggaggtgaagagaaaacaaaagggctggaaaacctatttaatgaaataatagatgaaaacatcccaagtctagcaagagagatttgaacttgcagattcaggaggctcagagatctccaaatagacccaattttaaaagatcttggccaaggacagcagctcacacctgtactcccagcactttgaaaggccaagacgggagttgttcaagaccagcctgggcaacatagcaagactccatctctacaaaaaataaaataattagctggatgtggtggcacatgtgtgtagtcctggctatgcagcaggctgagacggaaggactgcttgagctaccattagagctcaaggctgcagtgagctaggatcatgccactgaattccagcctgcgccacagactgaggccctgtctctaaaaaaaaaaaaaaattaaaaattaaaataaattaatttcaaatataatgatattgataagttaaaagagaataggaaaaaagatacaccatgtaaatactaaccaaaagaaagctgagtggcattactaatatcagaaaatgccagtttcagagaaaatcagagcagagattatgaaattatacaaaattatttaaaaaagacctggtgcagtggctcacgcctgtaatcctagcactttgggagactgaggtgggcggatcacttgaggtcaggagtttgagaccagcctggccaacatggcaaaaccttgtctctactaaaaatacaaaaattagccaggcgtggtagcatacgcccataatcccagctactcgggaggctgaggcaggagattgcttgaacacagggtgcagaggttgcagtgagccctcaaaaaaaataacgaaaattataaaaagatcagttcaccaagaaaacataataatcctaaatgctatgcctcatatatcagagtttcaaaatacataaacaaaaagctatcagaactcattatagttgagaacttttatacatctctctcagcaattgggagcgttctcaaagttataaagggcctgagttgggggaaaaacacatctatagtgcagtcatgaaaatgtagcctcagggaaaagatgaagccaatgtttattctttctgtgaaacagcagggcctctaagaatctgtcatttttgggccaggcatggtggctcacgcctgtaatcccagcactttgggaggctgaggcgggcggatcacgaggtcaggagatcgagaccatcctggccaacatggtgaaaccccgtctctattaaaaatacaaaaaaattagctgggcgtggtggcgggcacctgtagtcccagctactcaggaggctgagacaggagaatggtgtgaacctgggaggcggagcttgcagtgagccgagattgcaccactgcactccagcctgggcaacagagagagactctgtctcaaaaaaaaaaaaaaaaaagtatctgtcatttttccacagtggcctcttagggagcacaataaagagaagagcctgtggtgtgtcttttgtttcatttaatgaaccctaataaaattcacagtatacacagaattttcaagagaattgtactacttgatgcactacaagcttgagcttacaggggcagaaacggtacaaagtgagaaaggatctttgggttcccaaatatctacaagaaaaaagtatgagaatagtactcagttgtaaacatgggctactttttatgaagaaaaaaaagaaaaccccagcgtgactcagaaagtgcaaccaaaagatcagatggcaggacaagagccatagaaaatcatttccagggaacgctgatcaaggagctggttatgtgtgcccagccagatttcagaattgttacgattagcaatttccttcaactgttttacccaccaactttctgaatctgaatgcttattattctatggctgttccaccactggatgtgggtgtgtcaagaaactgtagattgaagttagttcccaatattgtggactgagagggctcatactcaaggagtgtatcccaggaactgcactgaaggaggcttatccacacctggacttgattttttttctttccaaatttaattttaggtgcagggggtacatgtgcaggtgtgttacatgggtaaattgtgtgttgtaggggtttggtgcagattattcatcacccaggtaataagggtactacccaagaggtagttttttgattctcatcctcccaccctctgtcttcaagtagtccctggtatctattgttccctgccttgtgtccatgtgtactctgtgtttagctcccacttataagtgagaacatgctggttttggttttctgttcctgtgttaacttgcttagaataatggcctccagctccatccttgttgctgcaaaggatatgattttgttcttttttatagctgtgtagtattccatggtgtatgtatgtatgtatgtatgtatgtatgtgtgtgtgtgtatatatatatatggtgtatgtgtatatatatatggtgtatgtgtgtgtatatatatatacacacacacacacacacacattttctttatctagctgggtttgatttagataaggtcctagacttcaaattgatactgtaataggatgagactttggaagcctgagggaagtgcatgagtgtattttcatggggcaggatgtgaatggtggccaggaggcaaaatgtggcagactgtatttttcaaagatggatacaataatatttcccatcccacatggtcttctacagtatgttcttagcacttttccatcaagaggtaaactcaaattccccttcctttgaatttgggctggatttaagtctcactagtaaccattaaaatgcagaagtgatgctgtaatacttccaaagctaggtcagaaaaggccagcttccacctggttctcttagaatgttcactcttgggatgttcatcttggaataaacattctgtgaaaaatctgtgaccatgtaggtgttcctgctgccagttctagctaagattggtattcaagtcctccaagtccaaaattcaagcatgagagagaagaagcctggaagtggatattctagccctacctggactagtcattcaaataaccccagctgagactccagacatcatgaagcaaagaaaaaacatccctgctgtattctctctggatttttgacccacagaacctatgagcataacatgcttgtcttatggcacgaagttttgggtggcttgttacgcagcaatcatcagagcacttaaacccttctcaaaaagaaccactggaaagttataccaaagagtaataaaatggttttttttaagagggaattgatggaacagattgtatggaacacaaactgatgcaaaatttctctgaacacattttatgtttttaactttaaaatcatgaaaatgttatagtctttaaaagtaaaattgaatcagaaataaaaatggcagtccttgaacactgaaaataaatagaaacgaatgaatctagctggaaatcaggttggttagaactaagcattttccctctacattcgtagtgaatgatatttgaaggacggagagtgatgccaagaaatcttcaacttcattcagcattcatgtttggtagtaatgctcgtattctgttgtaagtattttatactgtttatagatcacagcacatacattagttcattgttaaaatccaacaagatgttcaggggaaaagcaaaagacgcgagaataaaattaaagttaaaaataatgtggtattaaatttgaattggaagtatcaatataaactcagtttttattctcctaagttaaaaaaacttttaattgaactataataaacgtaaagtatacaaatgtacaactcaatgaattttcacaaactgaatacatcagagtaatcagcacgcaaatcaagcaacaaaacattactagcatctacagaaacctcccattgctcttaccatcactatccctcctgccatgtacccctacccccctcacccccaccagtatcttttttttttttttagagacggagtctctctctgttgcccaggttggagtgcagtggcgcgatctcggctcactgcaagctccgcctcctgggttcacgccattctcctgcctcagccacctgagtagcggggactacaggcgcccgccaccatgccccgctaattttgtttttgtatttttagtagagacagggtttcaccgtgttagcccggatggtctcgatctcctgacatcatgatccgcccgcctcagcctcccaaagtgctgggattacaggcgcccgccaccacgcccggctaattttttgtattttcagtatttttttttttttttttgagacggagtctcgctctgtcgcccaggctggagtgcagtggcgcaatctcagctcaccgcaagctccacctcccgggttcacgccattctcctgcctcagcctccccagcagctgggcctacaggcgcccgccaccacgcccagctaatttttttgtatttttagtagagacgggttttcatcgatctcctaacctcgtgatccgcccgcctcggcctcccaaagtgctgggattacaggcgtgagccacggtgcctggccgtatcctgacttctaactacattaaaaagttctcaatttttgtattccatataatcatatagtatgtcctcttttgaaggggtgggttgcccctccacacctgtgggtgtttctcgtaaggtggaacgagagacttaggaaagaaaaagacacaaagtatagagaaagaaataaggggacccggggaaccagcgttcagcatatggaggatctcgccagcctctgagttcccttagtatttattcatcattcgtgggtgtttctccgagagggggatatgtcagggtcacaagacaattgtggggagagggtcagcagacaaacacgtgaacaaaggtctttgcatcatagacaatgtaaaggattaagtgctgtgcttttagatatgcatacacataaacatctcaatgctttacaaagcagtattgctgcccgcaggtcctacctccagccctaaggcggtttttccctatctcagtagatggaacgtacaatcgggttttataccaagacattccattgcccagggacgggcaggagacagatgccttcctcttgtctcaactgcaagaggcattccttcctcttttactaatcctcctcagcacagaccctttacgggtgtcgggctgggggacggtcaggtctttcccttcccacgaggccatatttcagactatcacatggggagaaaccttggacaatacctggctttcctaggcagaggtccctgcggccttccgcagtgtttgtgtccctgggtacttgagattagggagtggtgatgactctcaaggagcatgctgccttcaagcagctgtttaacaaagcacatcttgcaccgcccttaatccatttaactctgagttgacacagcacatgtttcagagagcacggggttgggggtaaggttatagattaacagaatctcaaggcagaagaatttttcttagtacagaacaaaatggagtctcctatgtctacttctttctacacagacacagtaacaatctgatctctcttgcttttccccacactcttttatgtctggcttcttttgcccagcattatgcttttgagatttatctgtattgtacacagtcataggttgttcattttcattgcagtatagtgttgattcagaaattttatttctgcagaaaagcaacagttcaatattcagaaagaacaggtgactttagaacatgatgccacatccagggaaacatacctcacatccaccttccaacacaactaaccacctgacatgaggtccgaactttccacctttgctgtcacctgttttggttacagcacttatctgttaaaatgggttcatatcccatactcacaagcattaagagtgaaagttacagggtaaaaggtgcttcagatacattaagttaaataaaatcaattaaactctcattacttcattatttggagaagctatagttttattttcttaattattaattttaatatgctcatttaaccacagaatgctttctaaaaataccatcaagcactagtgtttcctgggaaatggtttcaaatgctatcaagtttcatattccatttgagaaatggaatataatgatgtaatacactgaacatcatggcttcccaattataacagcaaatacagttcataatggatgaccacggtgaaatcaccgaagtccaactgatgcaatcatttataagaactctgtctttattaattttgagaaggtaattttaaggtgttgggttacacttttacatacataaaattcattccattcttaatacatagaaagctaaaaaaaaaaaaaaaaaaaagacaataagcatgaattgagatgatactgggccagaatcgtatctcttttactatcattatgatgttctgaaggtagaatgcctagaatctaaatatataattaaagctggatggatctggtccaagttattccacataaatgattttctattctaaactgttggatataatttcccatagaaattagaattaccagatttctcttcatacggaaaatgtctagattttcgttttgccagccctcctcacctagttcttataatcagttttaggttagtcttgtagaatagtatgttggaaaaatttagcaattaccaattcttcaaagattttacttgtaaaaaattaggttctcggagtctctctgagaccactctggctcaggagagtaggattttttttttttaaagttagattctaaatgtattcttttagaaagcgtatcttctaaccgtcttaatttttcatttgtttgttggtctactcaggctctcttcattcagcatgtgaagtcaattttagtaatttttaccataaaataattctggattttcaatattttaaaatacatgtatagtgtgtgtataaatataaatatatatacctacacactatacacacacacattacatatatgtagtatagcaacttataactttaaaaatccatagctgtcacttttatcattcatatagctgtagctgtgtaatctttcatatttctgtgatcaaaactgcaaaggtcttgactatattggtatcttttaaagaaacacacacaaaaaaaccaagtctactttttattgtttatgccagcgctgacaatagaaatacgtgagctacatatataaattttcctataacaattttaaaaacaaaaaagtgttattcattttaatgtattttatttgaaccaatatatctaaaatattatttcaatatgtactcaatatgaaaaattgagatacttaacttttttaaaataactaagtcttcagaatcttgtgttttacaaaaaaacaccatttgaatttggactagccacatttcagtgctcaataactcaatttcaagtgctcaacaggttgctagtgactaccatatattagtacaggtctagtccattatttcccacatttagcagtagtaattgctttcttttactcattctttaaacatatgaagtgagagtcgggcatggtggctcacgcctgtaatcccagcaccttgggaggccaaggcaggtggatcacctgaggtcaggagttgagaccagcttggccaacatggtgaaaccccatctctactaaaaatacaaaaatcaacctggtgtggtggcgggcgcctgtaatcccagccactcggaagtctgagggaggagaatggcttgaacccgggaggcagagcttgcagtgagccgagactgtgccactgcacgccagcctgggcgaaagagcgagactccgtctcaaaaaaaaaaaaaaaaaaggtgcataccatgggtactataatatagagatagagaggtcaactaaataaaatgtggacctacattttaacttcctgaatacattatcgtcattatagtgtaattaatattccaatcccaatgtgtagagctttggcaacatccacaagttttaatatgtagaaattttctttttttctttgagatagagttttgctcttgttgcccaggctggagtgcaatggcgtgatctcggctcactgcaacctctgcctcctgggttcaagtgattctcctgtctcagctgcccgagtagctgggattacaggcgcatgtgaccacgcctggctaatttttgtatttttagtggagatgaggtttcaccatgatggtcaggctggtctcgaactcctgacctcatgatctgcccaccggcctcccaaagtgctgggattacaggcatgagccaccgggcccagccagaaattttttttaaaataattcattttaaactggctataatttcatggataatttgatctttaaaagaacatcatggaaaattttaaatacacaaaagtagaatagcaaaaacaaaacaaataaaaaccatgtatccaagacttaggttaccatcattttgccaaacttgttattcatcctcatttttcttttgtatgaacaaaaggacattccagatatatcatctcctgtgtatagacttcagaaattatctctaacaaatacacttttacataaccacaatgctattatcacacataacaaagtttcttaatattatctaatattgtcaatattccattctcccaattattgttaagtatctcttcttttacatgtttgttcaactcatgatctaagtaaaaaccactgtttcattgcatttgactgatgtctcaagtctgtcaatacctaggagttccaccttatttcttaaaatgccattttattggttgggaaaccaggtgattcctcttgtagaattacccttattttagatttaattgctcctttttgtgtcatgtaatttactcttccattccttgaattttctctaaactgggagttggctcttgaggcttaaattcaggttcaatatttttggcaagatgtgtatatcttactgtagcacattaggaggcacgtaatttttactctcttgctttttgtgaagttgagatgatgagtgggttcagacgttgtcagtctcatctattcactataaagttcacaaccttcactgaatggtgtcaacctgtacagagaatcatgcctagatccattatttcattatgtgttacacaatagtttttctaatataattttctattattctttctgcattcattagcctggaattttctaataaagaagaactttacctccttaacttctggttgccctgaaatacagttcctacaggaaatgcagactaaatgactttcctttcatttacacattttcagaatgaagtggttccctagcaaccttcgtgtgtatatacacagatggaagaatatggagataataataggtaagatcaaaagcttttccacattcagtcctgtaataaagttcttttctaggatgaatttcctaaagtttaacatggtttcaaaggtgatgaaaggcttctatatgttcattaacatattctttcctttaaataaaacttcctatgcttagttgtgagcatgaagcaaaagggattcccacgttcaaaaacctttcctctagaatgtacttcctatgctcaacataaaattcgcaaaggaagagttctaataattattaagttacattatgaattcgctgatggtaagtaagatgtgaatgttgtctaaatgcctttttacattccttacatttgtatggtttctcaccagaatgaattctctgatgttgaatcagtgatgaatgaagtctaaaggcctttccacattccttacagtcatagggcttttcaccagtatgaatactttgatgttgggtaagttgtgaaagcagtctaaaagtcttctcacattccttacacttaaagggtttctcaccaaaatgaatactctgatgttgagtaagctgtgagaacagcctaaatgccttcccacattccttacattcataaggtttctctccaatgtgaataccctgatgtgaaataagttctgagtaacgacgaaagaacttctgacattccttacattcatagggcttttcaccagtatgtattctctgatggagagttagatgatagccacgactgaaagtcttcccacattccttacaatcataaggcttctcaccagtgtgaattctctgatggagagtaagttgctgccgcactctaaaggcctttccacactccttacattcatagggtttttctccagtatgaagtttgtgatgtagtcgaaggcctgtactacacagaaaggcctgaccacattccttacactcatagcacttctcagcaatgttcagtctctgatgtcgagtaaggtgtgcatactgcctaaaggccttcccacattctttacattcatagggtttctcacccgtgtgaatcctttgatggagattaagttgtcctctaactctaaaggctttcccacattctttacattcatacggcttctcaccaatatgaattctctgatgtactcgaaggtctgagccacatgtgaagatctttccacattttttacattcatagagtttgtcagaagtatgaattctctgatgtcgactgaggtgggcacactgtctaaaggcttttccacattctttacattcatagggtttctcaccagtatgaattctttgatggaaagtaagttgttgtcgtactctaaaagccttcccacattccccacattcgtagggtttctctctgttatgacttttctgatacagaggaagagatgtgagttttctgtaagtaggcattttttcagaggtggtttttgtcacttgcctgaaacacacctcatgaggactttcttgttcttcaagtccacagcttttaattctttccattaccttccactgagataagttcatttcataaatatcctttccttgaaataactttttagtgtcatatctggattccaaatctgaaagaaaacaagaccaaaacatattttcctgttctacacaaaataaacaaacgaaaactttataatagaaatcggtgaccaaaaaaaaaaaaaaagaaaaagaaagcccaattgaagtaaatgggctcaaaatctctaaaataggtaatttaaaagaagctaaaaggaaataagaaaatgatgagttaagaccaggttatttgggtgcagatcaaagtttgagactccccacttaaatttttcaatttctcttttcagttagaatacagagcaaatactttatcaggagtaacatggactctgtcgaacacaaggtatcaactcaagccactgtcccctttgctgtccatgtccctatgacacttgcctgcctcctttctgctcctagaatgtgtcacaatctttcttttcttttttttttttcgagacggagtctctgtcgcccaggttgtagtgcagtggctcgatctcagctcactgtaacctctgcctcccaggttcaagcaattctcctgcctcagcctccctagtagctggaattacaggagtgcgccaccatacttggctaacttttgtatttttagtagagacagggtttcaccatgttggccaggctggtctcgaactcctgacctcaagtgatccgcctgcctcggcctcccaaagtgctgggattacaggcgtgagccaccacatccgacccaatctttccactttttggagcttttcactggctattaaatctcccaggaatcctgacttgggtttgcatggttgggtttctttcatccatcaggtttcattttaaaaatcagaaaaatgatccctgctgacttcatgtaatatatatcctttgttttctatcccagtcacttctttcttttttctttttttctttttttttttttttttaaagacagagtttcgctcttgttgcccaagctggagtggaatggcgcaatctcggcttactgcaacctctgccttctgggttcaagtgattctcctgcctgagcctcccaagtaggtaggattacaggcatgtgccaccgctgtatttttagtagagatggggtttcaccatcttggccaagctggtcttgaactcctgacctcgtgatccacctgcctcggcctcccaaagtgtcagaattacaggcgtcagccaccgcgcccagcctacttctttcctttttttttgagacagagtctcactgtgttgcccaagctgaagtgcagtggcatgatctcggttcactgcaatctctaccccagggttcaagcaattctcgtgtctcagcctcccaagtaactgggattacaagtgcccgccaccacacctggctaatttttgtatttttagtagagacagtttcacaatgttggccaggctgatctcgaactcctgtcctcaagtgatctgcccgcctcagcctcccaaagtgctgggattacaggtgtgagccaccatgcctggctacttatttcttgctgaacacttttctcaactgggttgttattcattaatttctccacttattattctctttattttcttaccttaaacttccccaagggcagaaacaatttttcactcaccagtgaatagcaaatccacagtacatattaactgtgaattaaattctcataattagtcaacaattatggcatatggtatcctgcctccaatcttaaaccttactacactgattaaacattctttttatcacttcctacagagatgggaaacaagtacatctaagctatctcagtaaaatatataaatggaaaatagtgatttctttacacttcatcatccttccaattgcctcttcatgtacacttgcagatacctccactgcagttcaattcctactttgcataatcataagtgaactttgccccctttcacgaccaaggtaataagagtctctaaatatttatctttacttgagtttacgtaacttgcacatctatgttacaggttccccgtatcttcctgaaagtccccataatgccatttgtgtacttcctagagaatatttcagtgattttccaggtgtaacaacaggtttatactatggtaaaaggctagtaaaattctgagcaaagagatgttttttgcaaatgcacctgttctcaaaatctttgcaataggaattcaatactcttcaaaaaggaaaaggtattttaaataatgttgctttagggttagggttagagttagggttaaagcaacgttatttgtaatatacccaaactggaaagagtccaagtgttcatcaatggaagaacagctaataaatgatggcatattaatacatcgcaatactatacaacaacaagaattaacaaactacaactacatgcagcaagggctaatctcaaaaacataatggtgaataaacaaaactagacatacaacaatctatactgtacaattccatttttataaagttaaaaaatgataattaataatctatggtggtgtcaggacagtggttagtcttggtggggaggaatgaccgaaagaagtcaagaggggcttctggtatcctagtaaagctctatttctgaatctgtgtactaattagatgggtgtggtcactgtgacaattcactaattatctgtatatttttgtatatatttatatttcaataagtttacttttaaaaagtatacgctaaaaagatagtaaaagacaacaataatttaaatgctgtggataaaatgtgaccagggacaggtaaatgaatggaacagaaaatactgctatataatcgtgtttctctctctctgtctctttctctgtctccccatccaaaaaaagcaatacaaaatatggcagttgtctagaattttggggataaagtccatttatggcctcaataagacaaataagatataagtgatattaataaaagcatcataattagctaaataatggtagtaaataagtaagtagttatgaaggtaatacaaaggttaagaaataagatgctcatttcaaaggatttacctgcaaattaaaaataaaaccagtaatctaaaaggaaagccagtcaaaaatcgaattaaaggctaaaacattcataagaaagtgagaacgtgttactgtttatagcattaaagtccacacaaactgggcaccatggctcgcacctgtaatccccaactacttggggaggctgtggtgggaggatcacttggggtggaaggattatttgaggccaggaagtcaagaccagcctggccaatgtaatgagaccccaatctcgaaaaactaaaattaaaagaaagaaatttaagcccatacaaattggcataagaaataataaacaatggaaaaggtaatggaataaaggaagtgagaagacaatggaaaagtaaatataagcataaacaaattaggacaaaatgtctgtattcactaataatcaaattagaataggttgtaaaatttatcctgtaaaatttgaaggttttcataaaaaaaaaaaaattgccagtgttgataaggtgaacttgagattgtcatatatggctccctacttaagtgacaagccagatcaagatcttggtattttgaacattctcagttagaaggctgttctataatatacacagctgagctgtacgctaccaaatagccatgtttgttcccaagtttgcctattacagttcttactgctgcaagcaactaaaattattaatgtttaaagacaattatttctatgaaaactaagttggatgtttcgtagtattggctatacataaacatttcatttttgtcaacgtaggcatgggtgagaaaatagtaaaagacagaaaacataaaaattcaagaattctgccctcagattgcttcacaagtatctttacattcctgttctacttcaaagaagttgaaatgggaaagaatagcctatgtttcataagtactttaatcaagacagaatgggctagacctacactgaaacaaaatgctgggccaaacatcaaaagattggactatgatagacaattttaatgttctacctccaaaaacatgtatgtaaaatatgtatatattttaattttaatattaacattatttaattatataatactatataatttaatattaactaataaaattaataagccaaatactagtttggattctactgaatcaaagagtttagtctagtaagcactgctaatgtgaaaacaaaatattagtccatcttagatcaaaatgaaagaagtgttatttccatttacagggcatcagctttaattaaaaataaaataggggcagggtgtggtggctcacacctgtaatacaagcactctggcaggccgaggcagacagattgcatgaacccaggagtctgaaaccagtctgggcaacatggagaaacctcgtctcaaaataaaataaaataaaataaaataaagtaaaataaaataataaaataaaataaaatagggagcaaattatcttgtcatccccggaggtatgctatttcctgaggtataatgtctcccccaccccttttttttctggctgatacaagattatacaggatacagaatatttatgaccaagacaattctaattatattaacatcagagatctgaaaatgttaaaaccctatgaccacaaaattgtacttctgaaaattaacactgatctaatactgcataatccatactgaattccaatgaaatactgaataatcctcaggttcagacgataatcttactgccatttcaccaaggaaccagaaacaactgaaagaaaaatatgtattctcttcaccacattctccaatcaatctatgtctgaattcttaccatatatgtggttttacttcatcaattggttccactccttcccatctactgaaggtcgctgcctacaaaactaccctctctctctacttcatcaatgttcctctctttgaaatcattctcgtagcctataaacatgttctaatatttcacatcgtaaaatatattccttgtactcttatgtatctgcttcccttctatggcaaaattcatccaaagaatagtttaaccttattttcatcattgcctcaccaccattttctttttatctctcagtaactctaaaacaaacaaatgaaaaacctttataacagagcatttctaacatatcaaaaagtagacagaacggcataataatatctccatgtatccagcattaaccccatgcccaatcttggcctacgcacctcccaatctacttccttcgtattatttgaagcaaatcttggatattacatcgtttcatgtgtacaaagtttgcatctcaaaaagcacttttacacataaccacaataccattatccaaacccaaaaaatgaattattaaatatcatcaaaagtcaatgtccacacttccatctgataaaattttaaacaacctaaaaagaataactcatccaaacagagttcacagaatacaactgttgacgtgtcttttacatctcttttaatctataggttttcctatcatttatttatttcccttgtaatttatttgttgaagaacctgtttttggtcctgtagtttcccatattctgaatttggctcactacattcccaaggtgtagaacatagtcctctgtcttcttcccgtaagttggcaattggctttagatgcttgataagacttaggaccttttgttggcaaagttacctcataggtgatatcgtgctctttcattaggagaaacaacacccgattgcctctatttctttgatgctatcagcactgatattcaatatctaaatccaatagttcttatgggttccacaatggtaatattctatcatttcttcttcatttattcactgaacacttttattaagagaaacatacctccatctactacctattcatataattcttataagaaaggcaggataaatgcttcttttccttttaatttatgctttttaaatgttagttttctagtaactttcaatgatgaataatttgctgttagtatcaagaatttataaaattaagtgtattttatgcattgcaatacactgcagtcattatatgtaatgacgttcaaatagtcccatctttggccaactggagcctgaccaacccatctaaaattactctattcattcattataattctccatatccttaccttactcacttttcttcataatacctaattacttcaggatattttagtaatccatttactgattttatttacttgtttactgtgtgactccccactacaatttaaactccatgaacatgggcaatgaaaaaatgtatacataaaagtcaaaatataaaagatgagctagaaagggattagattcaaaatacaggtaaaatggaatcactagggcagaaagctttcctctactgaaataggggaaagaaaagggagggaaacaagatagaaaagaaacgactgaggccaggcgcggtggctcacgcctgtaatcccagcactttgggaggccgaggcgggtggatcacgaggtcagatcaagaccatcctggctaacatggtgaaaccccgtctctactaaaaattcaaaaaaattagccaggcatggtggcaggtgcctgtggtcccagctactggggaggctgaggcaggagaatggcgtgaacccgggaggcggagcttgcagtgagcagagatcgcgccactgcactctagcctgggcgacagagcgagactccgtctcaaaaaaaaaaaaaaaaaaagaaaaaaaaagaaacgagtgataagtggaagtatggatgaaatgtctttgatggctcatgctgagaagatctaaattttcttcccaagtttcaggtctcttcttcacaattgacatctaaggggtgtgtctcctcctcaaccagcaggtctggccatgccataatggctgacctctgcctgatcagcacttacctagagtccatcttcttttctcatccctcacaaccatccagggctctttcccttgttccaatagggtgatcacatctggcttagaaatagaacatcctgcttaaaaataaataatagaatataataaagaatttatttaaggcttcaaaacaaagaagactatcaggattgaaaaacattcatagcatagagttacttcaggatcacaaggaaaaacaagaacacagaagtagggacctggttttattttaatttaaacttacacaggctctgtctcttgagagaaaagaatagttgaaagcactggtttcaaatcctgcctctctttcccatgtcagtagagcaactaattcaatctctctgcacctcatttttctcagacgtgaaaaagggataacagtaatgcgtatatatagcattgttgtgagattcgatttaatgtaagtgtttagatgagtacctggtacatgttaaccatcatatatgttcatgaggtactacatttgctattttttgattttttttttaaagaaaaataagtttcttgccaggatatgcatacaatattaaatgcaaattcatgtattttaaacttaatcacaaagcagttaaaatatgtctgttgtaggaaactgaatactgtccacttgagttttaacaaactgtcaattcaacccagcatcacatacactgtaaaagctcttttaatagctatgtagagccagacacctctgtcttcctattctcactgtaaatgagttacaaataacatggaccatccatagcagtatgaaatcagattgttttgacaatggttttgccatgagtgtctaagaatttatatccagctgtcattaaagaccggtaataacagaaaagtcgaagaaaaatataacggtcactgaattatacagaaagatgaaggtgcttaatagtggtacttactgtcaaagcacaaagcagacatttagctagtttttagaaagacagcccagacgcggtggctcacacctgtaatcccagcactttgggaggctgaggtgggcagatcatgaggtcaagagatcaagaccatcccggccaacctggtgaaaccccgtctctacttaaaatacaaaaattagctgggtgtggtggtgtgcgcctgtagtcccagctactcgggaggctgaggcagtagaatcgcttgaacccaggaggtagaggttgcagtaagccaagattgcgccactgcacttcagcctggtgactcagcgagacttcgtctttggaaaaaaacaaagacagcccagaaattcagtcctgtgaatgtctaaattatctgacacagatatgctaggcttacccagtgacaccaagttgctatagttctctaatatcacatctctgtacaaattcctctgatatgagttcaggcattcccattcttcctgagaaaagtctacagccacatctctgaacatcaccaaatcctgaaatgataaacgcatgtattatttgtaagataaatgaaaatattttgaagatggaagaaggtggctgggtgtagtggctcaatgcttataattctagctttgggagcctgaagcaggaggactgcttgaggccaggagtttgagaccagcctagacaacataccaagaacttgtctcaaaaaaaaaggccggcgcggtggctcacacctgtaatccagcactttgggaggccgaggcaggcagatcacgaggtcaggagatcaagaccatcctggccaacatagtgaaaccccgtctctactaaaaatataaaaaattagccaggcatggtggcgggcgcctgtagtcccagctactcgggaggttgaggcaggagaatggtgtgaacctggaagacggagcttgcagtgagccgagatcgcgctactgcactccagcctgggtgacagagcgacagagcgagactccgtctcaaaaaaaaaaaagaaaaaaaaagtggaagaagggttttgatgatacatgttcacttcatacatcaaatgaatagactagggctggaagcctgtgatgtgggaaggtggcaataaagatgtgagtgtgactgaagcagaatatgtgttcttgaagatttctataaacaaaagaccagggtttggcaacattttctgtaaagggccaatattttaggctttgtataccacatatggtctctgttccacattcttctttttttttgtaacaattatttcaaaatgtaattagcttgcaggctgttccaaacaagctacagcttgtgggccagatttatagtgtatctagtttgcccaccactgctatggccaaaacttcctacgtactatggaataggagataattttatttatttccagacatattcgggtaattatcagaatttttcaattaactgaaataggttcataggaacagtacttgcaaaggacctaaaaaattctcaataaatgggatttactctatcttcttttcctttaaagatttttaaaaaataataataattgatggtattctccccaaaaaatgaactgtaaaatgcctatttttaaaaagtatagtttgcataaaacttaaaaatgtcttctagatgtaactttatcataatgtatcattagcatttttattataacagattctttatttaatatttacagtttactgcatgatacagtagttctcccttactcatggttttgctttcctcaatttcagttacccacagtcaaccatggtccaaaaatataaaatggaaaaattccagaaataaacaattcataagttttcaactccatgccattctgagtagcatgacgaaatctcacactaaccactccgccccacctgggatgtgatatgctttgtccagcatatcaacattgtatatactacctgattatcagatcaaaacaacatcataaatatagggttccatactatctgaggttttgaggcatccactgggggtcttggaatgtatcccccttgggtaacgagggactgctgtactccatctgatggatatgttacacttaatagtgattatatttagatatagctatacttttaaatatattatatttagaatttacattacaaaaaatatctaaagctgcttcaatgcccaatattctagtttagcaatatgtggatactgagcacttgaactgggactagtccaaattcacatgtgctgtaaatgtaaaatatataccagataccagatagtgaagactttagaagcaaaaaaacaaggtaaaacatattgatgatttatatatatattctttattttatcttggttttgaggcagggtctcactctgtcacctaggttggaatggcgtggcacaatcacagcccatttattgattacagctcactgcagcctcgaactcctgggttcaagcaattctcccacctcagtttcccaaattgctgagaccacaggcatatgccaccacatctggccagttttgttttgttttgttttgctttgttttgtttttttaagagatgggatctcattaagttgctcaaggttgtctcgaactcctctgctcaagtagtcctcctgcctcagccttccaattccaaagtactgagattacaggcatgagccaccactgtcagggcctgaccatgacttttatattgattacactgtgaaataatattttggccatattgggttaaataaaagacattaaaataaactacatgtgtttctttttactttttttaatgtgactactaaagtatttaaaatatttgaccttgcatactagtctacacttttaaaatttgactactagaaaattttaaattatatttgtagcttgaattacaattattttggacagtgctattttaatcctgagaatttcagataaaatgcccacttctaggaacttcatttctgccccatctctgctctagacagataaggagcacacaagagatgctgaatgatttggtcaatgcacacatggatactggtacaatttggctgtgtccccacccaaatctcatcttgaattgtagctcccataattcccatgtgttgtgggagggagccggtgggagataattcaatcatgggggcagttgcccctatactgttttcatggcagtgagtaagtctcacgggatctaatgattttataaggggtttcctctttctcttggcattcattcactctttgcctgccaccatgtaagacatgcctttcaccttccaccatgattgtaaggtctccccagctatgtggaactgtgagtccattaaacctctttttccttataaattacccagtctcaggaatgtctttatcagcagcgtgaaaatggactaatacagatacagatggagaagacaggggcacttaggaatctggctggctccatcccgtgctggaatggggaagactggggagaagctgttgaatggggctctgttagaaagttgcagaataacaaatgagaatgttcacataacctgaaaaaaatgacagaattccaaagtagagagaaattccaacttacacgagccatgattttagaactgctagaactggtcaattttcctcaaggttcatgtacttcagaagcagggtccacagacaccagagctgcagaaagaacatgtaaaatcatgagaagagaactgcctcagagtttccaaattttaaaaactggtactacttctccattcctatatgcaactcccacccccaacacacagacaagttttgataggtaagaggtagtttagacaaagatgtcctccccaaaaccacagcgaaatcagctcagctgcacaaggaattgaagagcagagactctgcggcatcaaagcatatgtctagacacttcagcaggagggctgccagttggtccccagctctgaccccaaggcgggctggtttggaccaaagaatgggttgtgcagacctgtcctgaacagatcctcctccctccatccccaccttcccagctgaaaaggggctacaccatctaaaccaaaacttccttcttggccttaggaatctggctggcctccccaaacatgaagacaaaaaatagcatagacaagaatttcccaaactttgctcaaattggaatcacctggatatctttaaaatatactgttgcctggctcccacccttaaacacactgatttaattagtgtgacgtgggatttaggattttttttttaactacctcctcctcccatgggtgcttataatgggcagcaaagtttggtagtcaaactttagtatgcatcagaatcacccagagggcttcttaaaacacaacttgctaggtctcactcccagagtttggcattcagtacgtctgggattggacttgagactttgcatttctaaaaagtttccaggtgatgctgatgctgctggtccagatgccacactttgagaaccacaggtataaaacacctgtagaaaggctatatagcagcctttattatggcaaaactgcaggtgcacattgggatcccttccccaaggcttaactcagagctctctgctccttattttcctattcaggatcatcaatattgcctgcatgatctcaattaccaagcaatctttcttggtactcagacttagagaagtaaatttatgaagcctgagtgtggataatgttctagaagctagaaataggctgggtgcagtggctcatgcctgtagtcccagcactttgggaggcccagatgggaggattgcttgatgccaggaattgaaaaccagcctcaacaacatagtaagatactgtctctaacaacaaaaaaatttttttaaattagctgggtgtgttggcacctgcctgtatccctagttacttgggaggctgaggcaggagaattgcttgagcccaggagttcagggctgcagtgagctatgatctttccactgcactccagcctgggtgacaaagtaagaccctgtctcttaaaaaaaaaaaaaaaaaagaacaaaataggaaaaagaaataacctatcagcttatcagtcaaaatctactcgtaactagagagcatattgaaggaactggattggcagatttcaaaaagctatgacacctcatagttactaagctgttggggaaatggatactcaatgatatgatgtacaaagaatgaaataatatgtggatagagtgtttaaaatgggaccaaaaaagctggaaagaacctaaatgtccttcagcaatgtcaaataaattatcatgcattcacacaatggaaaattaaacagccgagtgcagtggctcacacctgtaatcccagcactttgggaggccaaggcaggtgaccgcttaataagtccaggagttcaagaccagcctggccaacatggcaaaactccatctctacaaaaaattaacggggcatggtggtgcacacctgtggtcccagctccctgggaggtcaaggtgggaggatcgcctgagcccaggaggtcaaggctgcagtgagccccgttcatgccactgaactccagcctgggcaatagagtgataccccgtcttaaaaaaaaaagaaagaaaagaaaaaaaaaagaaaaataaacacccattaaaaatgaagataaaattcatatttgatgtcatgggaagatggccactacatattgttgggggaagaagacaggttagaaaatatgattgtaatgtaattgtatttcggcaggtaaactacatacacatgcatacatgtatatgcatgtgtataaaatgatctgtgaattggaataaaattttattgttacctttacttgatggtatcccagtcctaggtgatctttatttgttcttccctggaatctttacattttttttttttttaggcaggcttttgctctgtcgctcaggctaaagtgcaatctcggatctcagctcactgcaacctccacttccagggctcaagcgaccctcctacctcagcctcctgagtagctgggactaaaggcacatgacaccaccctggctattttttaccgcgatgcagtctatgttgcctagcctgctctcaaactcctggactcaagtgatccacctgcctccacctcccaaagttctgggattacaggcttgagccactgcacctggcctgaattttttaattaaaaatttttatcacttatacctgaacaaaaattcaaaacagctatgcaaggaatatcacaaaaagctccaacagttccatccctgctactctgccccatcttccaaatctagaggcagtaatttttacctctattagccattccttttggtatttaaaaaacatgctaatatttccacttctgaattttcagttgtaatcattacatattcacttactactataagaggcatagttttagctgtcttttacctactcaactcccacccacatatgcatagttgcagtccctttgtcctttcaatatgattttcttttccttttttttttttttgagacagagtttcactctgtcacccaggctggagtgcagtggcacaatctcaactcactgcaacctccgcctcctgggttcaaccgattctctgcctgtcccagcctcccgagtagctgggattacaggcacacaccaccacgcccagctaatttttgtgttttttgtagagatggggttttgtcatgttggccaggctggtcttgaactcctgggctcatgtgatcgatccaccagcctcggcctcccaaagtgttgggattataggtgtgagccactgcacccagcctcaatatggttttattctatttcagagtaaatcagtttttaaattcagtttacattactgtgactaaacattgttaccaactgaactatgcagtatactcaggttattttgccttttttgcatatgacttttttttctgagattaaaatgatcttgttttttgtaagtttagttttctaagaaattatcattaattcatttccccgaatcatgtaattgaaggatgaagctcctggtataaaatagcacagctggccgggcacagtggctcacacctgtaatcccagcattttgggaggccaaggcgggtagatcacgaggtcaggagatcaaggccatcctggctaaaacggtgaaaccccatctctactaaaaatacaaaaaattacctgagcatggtggcatgtgcctgtggtcccagctacttgggaggctgaggcaggagaattgcttgaacccgggaggcggaggttgcagtgagccgagatcacgccactgcactctagcctgggcgacagagcaagactccatctcaaaaaaaaaaaaaaaatagcacagctgtctattttatattctaagaatgaaaaatcaatccttcagaaatacagtcaaatacttcaaatacctgtatcccacctggcaaaagtcaattcctaaatatgcctaactctgaaattcacatgactctgaggtgaaaagttgatcaagtcataggagccagaaatcctcctgaaggaattgcttgggcagtttggaatattcctgtccaataagtcatttcttaaaaaatttacaaaacatccataaaatggaatactaaggtaatcactaaatgctaaattttagaaaacagttaaggaaaggaaaatattcaagatacactgaaagaaaaaaaaagtttacaaaacaatatatgattagattttttagaccattaaagggaaacagacttgaacagatgaaaaaaactcttaaaatttcaattctgagattttaaaattaattttaaaatcagatttaaatctcaacttaactgaaatttccataatttgaagaactgtaaatatttggaaggtctgtcaaaccagaagtggatcactgggatgtcacttttctccatacatccatggagtcatataatccacaagagcactgaattcctcttttaaactaagaactagaggtcttagtttcttttaaatttgcaattagtattagcctgttcttcagagagaaaaccaccagccgggtacggtggctcacacctgtaatcccagcactttgggaggctgaggcaggtggattgtctgaggtcaggagttcgagaccagcttggtcaacatagtgaaaccctgtccctactaaaaatacaaaaaattagctgggcgtgatggcaggtgcccgtaatcccagctacttgggagactgaggcaggagaatcacttgaacccgggaggcggaggttgcagtgggccaagatcgcgccactgcactccagcctgggaaacaagagcgaaactccacctcaaaaaaataaataaataaataaaaccacacacaaaaccacacagacttgtagaaatattttgggaaaatatgctctaaaacattaataattattatttctggacattgggaccattgatcattttaattttctttataggttccgtagttactaatatttcacaagcttgtattaattctgtcatcagaaatattttaaaaagctattccaaaaaattttaaatgactgggaagataggctaccttacagtcattaagaaaattgtgggccaggtgcggtggctcacgcctgtaatcccaacactttgggaggccgaggcaggtggatcacttgaggttaggagttcaagaccagcctgaccaacatggtgaaaccccgtctctactaaatacaaaaaattagcctggcatggtggcgggcacctgtaatcccagctacttgggaggctgaggcaggagaatcgcttgaacccgggaggcagcggttgcagtgaactgagatttcggcattgcactccaacccgggcaacaaaatcgaaaactccgtctcaaaaaaaaaaaaaaaaagaaagaaaaaagaaaattgtgattaaacaggccctgcataaatggtgacaacagggaaatcagtgtgactgaaaaaataatttctaccagttcctgagtattgtatctcatcaagaccctgaaatagttctgtgaaggattacaatcctggttcatgtcatttccaaagtgattaagagccagtaagaactgcagacaaaaacaaatgctcatttcacagcagctacttaataacttgcatttacccctcctcagctccaataaataactaatcattaaatacctagcaatttaatatttaaatattacattgttgcaaaataacttaaaaacctttattgtagtatacaagattcatatgtaacaatttcttgatgattcttatttacaacaatacttctcaatattacattatacttttttcttatgactaaatataaacaaaattcttattattgcataacattccatcacatggagtgtgatttaaccatttccatactgctagatattaattttataaaagaacatcccgaaagtcattaccagttatttcatttctagacagtgagaatcaatgttgttggagcttatacaactctgataataccatgaaatgatagacttcctcgctccactgaaaaaattaaccatttacaaatacatacaacaattctgtatataatcttaaaatatctttgttgccctgaaagctcataaacagagtccaaggacttatgttaccaatccctgttctggtccactgcagggtctggctcattttcctgcttgcaagcatccatcataattaccttcacatttgcattggtcttggaaatacacaaagctgataggaaatgactgagcatcatcattttaataccagtagctagtatgaattaaggactcactatgtgccaggcactctcctaagagcttcacaaatattaattcatgtaatcttcaaaacaacaccgtaaagtatacactattacaattctgaggaaattgaagcacagattgcttaaactcgttcagatttaagtggcagtcaggattcaattccacttaatctaggctcgaaattcttaaccactacactacacctccctcagtcgatccaagatatacccaaaataaactcatgctgccagacctcaaaccacatctggctggtaccaaaaacttccactcatgaatttcctggaaaaaaagaaatctccactcctaccccagaaccattaaacatatctaaaccctaaaaaacaaataaaaacaaagtatgaacattaatctccagcacgggtatttccatatcatcaagatccttagaaaaacagcgctcacagagtaattgaatttgcagcctacagttaactaaccatgtgtctaactatagaacagcatgaagtgggcactaacaacgggaaatctattaattaggtcccctgccgttaactaggtagggaaatcctaaggcccaaatcaatgaataaatagatcattcctaagcaggattttaaacggaaggaactcgaatgcatttcacagaaacaaagcagcagcacgaactcacagggaaccggcttttagaagagcagcagcgattcgtttctccttctcaagcgccttctctggaaactggcagggctggggaagcaggcagagttcaggacaccccaggcttttcttgactcgattggaacccaccctccacgcttccctggccccaactaaccgccacctgcatgcacaaatggaaacgacagggcagagggtcagcagtcacccgcgtctgggttcgcagctccgggtacgctgtagttccgcacccggttgcccacgcccgggaccacccactgtgtcttttcggaactgtccagcgtgtcctcctagaccccagacacccaccccaaatctaggtcccagcgttttgcaggggaccttcatcctggggcgttcacctctgacttccctcttgggccttttcgctacggccgagcctaagtggctgaagcgcggacgaggatgcgcggggcctcggtctccaactgcaccacaggccgcacccacgaacctggtccggcacagttactaccgcccgggcctccaggcctcagggctgcagaagctcagtcccgggaaaaaaagcacaccggcctgaggctccacaggaaccttttctccaccttggcccggcctgcaaaacctggcccactccgcgctcttttccctcagaaaagcagcggccacagtggcgcccggctcccagccccagcctcacccgactcagaggatagcccagccctgggagtcagcggcgccagaatacgggagagcgcctgtctccgtcgcgaatgcgctagcgcgcgggggggcggaggcaagtcccgcagctgctccgggccgggaggggcgcgtggggccgggtctcggcggggatagtcgggccggggagacggagccagaggggccgcagtgtccctcgcctcaggcctctacctgtaatggccgccccgtgactgaccagtgccattaaagataatccaggcctgctcccctgtggacactgcggtccaaaatttaaaaaaacaatattccgcctttttatttttcatttggttctcggctcggagacaggcggaggctgcgagccccgccccgcccccagcgacgcctcaccggaacctttggaaatcggcttctgcctcgagtgcgcaagcgcgcggggggcgaacgctggggcccttcagggagcaagggagaagtgtggggccgcacctgccgaggggtcgggaggtttggaggagggtggaggttggctacaggatcccgatggggatggagtgttcaaatctaggcctgtagccgtgaccctggcgtgagttggatggaggaaaccccagtatcgcgagcctggaccaaggcgcggcgcgtgctgcctgtggtgtttgctgagtgacggccgccgcgcccccgcgtacctggaccgagtgcctggccgctggcggagtagtgtttccgtgcacggggctgctgcgtgcgcgtgtgccgttctctagcgggggattaggatggtgccgcagagaaggctgcgcggtggtgcctgactctgacgctggctgtagcgggtctctggggtctttgcggtttgtgtctgcgtttgtgacgtacctgacatcggatctgtgactgtggctctgcctcatccagcgttatttccagaatccttctgatagggcagcgcttctggttctggttttccatggagacggtttgtgggtccctatgaaactgagtgttgggattttgattatctgcatctggcccttgtgtgccctcaggactgtggtgttaggcaagtaaaataattgcaggaaaaaaaattggaaaggaataaggttgctattacttccaaatgatggaattgtaggactgtgtcagaaaattgaataggacaccatgaaacgggagggagaggcattttattttcttccatacctggtcttggaatattctaacaaatgagatttgttttttcccctttgttcctggatgaactcttggataaattcaatgtctccaagcattcttggatagtaagtttctttgatctttagttgaaagatcagcctcattttcgtagctaaaaatacctttagtaataaaaatgttcattgtaatacttcatttaaaatatttaaaactttcttctttctccttgatctcttccagatatctcaagttttggttaagtgaatatgtggagtatatgtactaattacgtcaattattttctctttaaaaccaagtacatttcttacatgagtttgtttatcaaggatttattggttttctttgtacttgttgctattttttagaaatgttccaacagatatgttaaatgttcatcgattattttttcagtggttcaaacatcggagtagaatctctcttccattctgtggctgcaattggactgtacagttgtcctaaaatttaccgtcattgttttcctaagtttgattcttgtttcctagaattcagctaatttttgctaaagttcttttccaataagttccttaagatgcatgtattaaagatgttttttagttctttcatgtttgaaattttttttttttttgagacggagtctcactctgttgtccaggctggagtgcagtggtgcaatcttagctcactacaacctctgcctccccagttcaagcgattcttctgcctcagcctcccgagtagctgggattaaagacgtgcaccaccacgcctggccatttttttttttttttttttttttttatagtttaagtagagatggggtttcaccatgttggccaggctgatttcgaactccagacctcgggtgattcgcccacttaggcctcccaaagtgctgggattacaggcgtgagctaccgcgctgggcctgaaaatgtctttattctgccttcacactttgcctagattcagaatttggaggcgtcacttcacagtgttctagtagctaatgttgtcaagtctaataccaattgttttctgttcctttttaatttcatgtcccactcccaccaacgcccagatacctattgccacctgtaatccacaatgcacttacatttcataatttatgcacttggcatgtatgtttaaacatttttttctgctagttatagggcagcactttataggtctgaacatttttcttcctctttttcttttttgacagtcctctatccttctgaatttttgttctcttgtcctggaatttgtatttcatggaaggacttttcatgagctgtatgttttgtctcctattttttctctttttctcttactttgggaaattttgttgactttacagtacaattgtatttatttttaatttgataatcatttctaatttccaagagctcctttatattctgtaatttttatttcttcatagcctttcgtttttattatggatgcaataaaacctctaatctctcagagggcaattagtttaaagttttctggtgcttttttttttaatctatttttgtcttttatatccaaatcaaattccccctttacaaaaaagtttgaattgttctctttttatactggatacttccctgaaatgtgtggtaatccttgcctctagtcatggagtgaatcttctcaacctgacttcagagccagccgtttcattgggagatgtgagctgttctttagttcctcctttgaggacagtgagttagtgatgtctgagacctcaaagacctctcagaggcccccagttttgagtgtagtttttcatttagtttgcctatgactcagttctgtctttctttatgcaggtatacatcctctctgggtcattttatccacagatcacccccctaccccaatttagtgtatttgatcacataagagaggaaaagtaaaaaaggtgaacagccagtttgtgttcaaactttcaaccaatctcctgtttccagatccacatctctccagggtcatgctctttggtgcctgagcttccaggggtttatgcattgaattgcctcattaatagaaatctgactcctaagccctttcataccagaattcttggacagttctcctgtttttgtgtgtgcgtttttttttgttgttgttgttgttttgtttttgcagtctccctcctcattttctttggttcttacatgttaatactttttatattcctttacttaatatattcattttaatattttttttttgcagaggagaaatgggaaatcaatgcatctacttactctgtttatggagaagcctttcattactcttttaagtaagattttgcttgtaccggactttttttttttacaccagcttatttcttttagttactgcttttgttttctgtttcattaatttccacttttatctttatcagtttcttctgatgacttctcagggtgtattttctacctttttatttacagttttctattcctttcaaattcatcaggttgtattctgaaaaaaacccttggtcttaacttccaacttgctgagagatgttctctagctgtttcagtattttcactccttttttagcccaattattattttttaaaattaattctgaaaaattacagatacacaagagaatgtataaatgtgtttacagttgaatgaatgaaaataatgaaactaattcttgtaccataacttcataaaatatgaaggtctcttaatatgtttttggctaatatttacataggaaaaaatttacactcctaaaactcaatgtgacatattttttattttgaaataattttgaattttcattctcctatagccttcccccagattcaccagttgttcatggttttccacatgtgccttatcatactctgtccatatttatattttttagtggaccacatgagagtaaattccaatcataccctttacatctaattactgaagtgagtctgtcctaagctcaaagacatttagttactttaccattaagtattaaaatcaggaaatttaatattacaaaaatctaatgaatgccctttattaatatattttgccagttgtacctgcagtattcttgaatagcacttttttatttgtctagaattcattgtattatcactgattgaatttggctgataagtatatttagtctttcatctagagcagttcctcagtcttttttgtcatttatgacattgatatttttggaaaatactggccatttgtttgtaaaatatccttcaatttgagtttttctaatgtttcctaattagattcagactatgtatgctttggcacccatatactgtactacactataccatactgtactatatacacagtgcttttccattttatttttgagatggagttttgctctgtcacccaggctggagtgcagcagtgcaatctcggctaactgcaacctccgcctcccgggttcaagcgattctcctgtctcagcttccccaagtagctgggactaaagccgcacgctaccatgcccagctaatttttgtatttttagtagacacggggtttcaccatgttggccaggctggtctcaaactcttgacctcaggtgatcctgaggccatcctggccaacatggtgaaaccccatctctactaaaaatacaaaaattagctgggcttggtggcacacgcctataatcccagctgctcgggaagctgaggcacaagaatcacttgagcccaggaggtggaggttgcagtgagccgagattgtgccattgcactccagcctgggtgtcagagggaaactctgtctaaaaaaaaaaaaaaagtcaaaggagatgctgtcattaacatgtggacagcaggcattggccagactgtcccaggcaaagcaggacatcaggtcatcctaggcttgcaggaccatcacgtcttccctcttccccctgactcaccctaaacactataacaaccagaaacatttccacaaacaaccactcttcctatttggaactattcagaggccttacctgtcatgtggagataatattagtgcctattgcttgggtaaatcatggggctgttgtgaggttaagttacttaatatatgtcaggcattgggaacagtgtgcaaagacacacacactgtacattcaaggatactcactgcaatagcagaagtctgaaagcatcctacaattatcaatgggtcactggttataaaaattggatacctttgtgcattggattataattatctaggataactgtatgtttgtatttgttgaggacagtcctggtttatgtccttgtcctggagtaaatgatatcacccactttcactctcaaaagcatactgctttgaatgttacataatctggttactctttaggtctatacatgtagatataaaattgtctctaagaggctgggcgccacacttgtaattccagcactttggaaggctgagacaggcagatgacttgaggtcaggagttcgagaccagcctggccaacatggcgaaaccccatctctactgaaaacacaaaaattagccagatgtggtggtacacgcctgtaatcccagctactcaggaggccgaggcaggagaattgcttgaacctgggaggcggaggttgcagtgagctgagatcatgccactgcactccagcctgggtgatagagtgagaccctctctctctctctcaaaaaaaaaaaaaaaagtctctaagatgctgggagtggtggctcatgcctgtaatcctagcactttgggaggcctaggcagggggattgcttgagctcaggagttggagaccagcctgggtaacataatgagatcccatctctacaaaaaattttaaaaattagctaggcatggtggcatgcacctgtagtcccagctactcaggaggctgaagtgggagaatggcttgagcctaggaaattgaggctgcagtgagctgtggtcatgccactgcactctagcctgggtaatagagtgagaccctgtctcagaaatagaaaaataaaaataaaatagtctctaagaaagtttaatatgggaattgaataacaattgtttaagtaaaaaaaaactagaaatgtgcaaaaaataggaagtacacttagatgcatacatgtgcttgtgtacggatgggatatctggaatgagatgcaagaaaatgattaagtggatttctgggactgggatagaactgaaggactggtcagaacaggagagaaacttacctttaatgggacatgctttttaacagtttgatttgcttttgaaaagaactatgaacatgtgttaccttttcaccaactataaaattattattattattattattactaagtatatggagagggctcttgacaggaatctgatgtactgtcctgttccatgaattttccatcccagaagccccatggtcagctgggcattgccaatcaatgggatgccgcctggtccagggtcactctgacgcatcagacatctgctttgcttcaattactacagggttgcctttgaagacagaatttccatgcaaggtacaagaagcaggaccaatgataagccttctcttggagtaggagagtggggcaggtagatctcagagtgagctcataaacagagtcctggtgtgtgagtgctggtttcttctacagtgatccgtcccaggactgctgtgacccctgtggggaaggagcccgcatagctggtgttgctgtctggagtagaatcctgtgccccactcttctcatgtttggatatatctactaaacctcttgttttaatagcaagacattgagctgctgacaacccataaaaggtacagccttggctgggcacagtggctcacggctgtaatcccagcactttgggaggccaaggcaggtgggtcacctgaggttaggagtttgagaccagcctggccattatggtgaaaccccatctctactaaaaatacacaaattagccaggcatagtggcaggcgcctgtaattccagctactcaggaggctgaggcaggagaatcgtttgaacccgggtggcagaggttgcagtgagccaagatcatgtcactgcactccagcctgggtgtcagagtaagcctccatctcaaaaaaaaaaaaaaaaaaaagggtacagctttaccctgcaggatgtcagtatgtgagtaaattctttgacttgatttctcaagtggctacacagtagggcagaaattgcccggcctgtttcacggaactgaggcccagacattttcagggcagaattgcaggtagaagaatggcagagcttgttggctgggacttccctaggagaggtgttgcctgtgctggggacttggtggtgtggaagcagttggggatttcactatgagattgaagtgaagtcattattgagtcatgaatggagtgtaagtgtggcttgtacctgtacatgccagccctggcaagagtctccggtccagttgcaggggtgccataagcagcgaacagcctttggccatgaggtcctgttttttcccctttcccaggttgttggtgatggggttaactggacccaagatgatgagagagaagggaagcaggtccgagccacactcggagctttgacatctggagctcaaaagatgtgggacagtgtgtgcctctgtgtagggagggctccctgcaagccaaagctcttggtttacaattgggcgtatcaattaacttgacccagtcaaggtgaatctcagaggattattttggaatgccaggcaaaggtgctctccctcttgtactggaggggatatgtccagataggaggcctggaactgatgcagtcatgaggaaattagcctcaagccaaagccaaaacactggcaaagggagagctgagtgttcagtgttgaaacctgatgacatagtgaacatcttgatcatgccatacctgaagctccatttatctttggactttttggttacaaaagccaaaaaaaaaaaaagtcattaatttttttgctaaatgaactattttttacaatggttttagatttatgtaagacacaaagatatgacaatttcatacactcacaccaggtttcccctagtagtaacacttaccttaatatgatacatttgttacaattaaccaatactgtcagggaacagggcccatgcctgtaattccagtgctttgggaagctgaagcaggacaataacttgaggccaggagtttgagaccagcctgggcaacatagcaagacccttcactacaaaaaaatattttttaattagccaggcatggctggtgctgtggctcatgcctgtaatcccaggactttgggaggctgaggtgggtagatcgcctgaggccagaagttggagatgagcctggacaacatagcaagaccttgtctctactaaaaataaaaaaacaacagctgggcatggtgacatgcacctgtggtctcggctactcggaaggctgaggcaggaggattgcttgagcccaggaggtggaggttgcagtgagctgagattgtgctactgcactccagcctgggtgacacagcaagagtctgtctcttaaaaaaaaaaaaaaaaagccatggtggcatatacatgtacctgtaatcccaacactttgggaggctgaggtgggcagatcacaaagtcaggagtttgagaccagcctggccaatatagggaaatccgtctctactaaaaatacaaaaattagccaggcatggtggtgggtgcctgtagtcccagctactggggaggctgaggcaggaaaattgcttgaaccccggggaaggaggttgcagtgagccaagatcacgccactgcactccagcgtgggtgacagagcgagagtccatctcaaaaaaaaaatttttaagtatgacatagtgtttaccaagcaaatttggaaggaacaggtaatcaccattaaatgtttatcaattatttctataagattaaattacttttccaaaaatggacaatggtggcatcccaaaattctatgatacacttttatgtcttttgtgtctttttatgaagctagctataaaaattaccagtaatcaatgaaaattaggagacaagtaaggaaagaaaaatgaatatagaataggcaacttaaatgaaaattacataaaagcattgatagacataaaccttgtcagtaattccaaaagtgagtggactgttatagttgaaacttttttttaattagaaaatactaatctgggccgggtgcagtggctcacacctgtaatcccagcactttgggaggccgaggcaggcggatgatgagatcaggagtttgagaccagcctggccaacatcatgaaaccctatctctactaaaaatacaaaaattagcggttttgatcatttacagtttcaaagtatcttcccacaaaacacttagtaattaaaaaggggaatatgataattttagaatggacaaacctggtcaacaatactttaatcaagagatacaggttagcatcactaatgtgatgcactgttaataaaaaaggaaaggctggggcacggtggctcatgcctgtaattccagcactttgggaggccaaggcaggcagattacctgaggttaggagtttgagaccagcctggccactatggcgaaaccccatctctactaaaaatacaaaaattagccgggcgtggcggcgtgcacctgtagtcccagctactcgggaggctgagtcaggagaattgcttgaactgggaggcagaggttgcagtgagctgagatcacaccactgcactccagcctgggtgacagagcaaaactccctctcaaaaataaaataaaataaaatggaaaagcactgtgtatatagtacagtatggtatagtgtagtacagtatatgggtgccaaagcatacataatctgaatataataattaggaaacattagaaaagctcaaattgaaggatgttttataaaacaaatggccagtattttccaaaaatgtcaatgtcgtaaatgacaaaaagactgaggaactgctccactatgtcctgccaaaaaaaattttttaatagagttgaggtctcactatcttgcccaggctggttatcaagctcctgccctcaaacaatacaccagccatggcttcccaaagcactggaattacaggtgtgagctaccatgcctggcctaagtaatagcttttaaaggtaattatctttgattaatttttcaatgtttttgaagggataatttttttgaaagacctttctgaaggtctttccccatatctaacattcatagggtttctgattagtatgacttacttgatactgagttaactgaaagttatgaccaaagtctctgccacattccttatattctctgcatttctttccagtgaaatttctctgatgttccatatgatttgtgcaaaatataaaggtgctcccacacatttcattaagcttatcactggcatggattcttccttgtggagtaaagttttcacattttggcttcattcagactttctatagcttcaagtttggcttcattcagattttctatacctcagtgaaccaactagaaacatttacatattcctgtaaaatgaagtttaccatagatattttaaatttaattgaaatactaaacaaaataattcataatattaaaaatgcctgtaaaatttccatgttcccatttgcactgatgcatttatgttatttctcttactcatctcaatcataactggcaaatttagtctatattactggttatttcaaaccacttttagataaagtccactttctgtttagctcattttctttttaagtaattcattcaaattcactgaataaacagattgatttgtgaatacgtttccagcgtcaattttgggtttgttacttttctgcttgaatgtttattcagatgagccatatacctcaggttttattatgcaacactctcactatctttcatatctaaacagcttgttatttcagattacatttttcacttaatccaagaactatatatggtggtgtttataaactgcaaatttttaaaatttaccttttgtatctacttgtcttgtttttttttttgagataaaatctcactctgttgcccaggctggagtggagtggtgagatctcggctcactgctacctccatctcccaggctgaagcaattctcctgcctcagcctcccgagtagctgggactacaagtgcacaccaccatacccacctaatttttgtatttttagtagagatgaggttttgccgtgttggccaggctggtctcattgtttttttctttttttttttagacagagtcttgctctgttacccaggctggagtgcagtggcacaatctcagctcactgcaaactccgcctctcgggttcacaccattctcctgcctcagcctcccgagtagctgggactacaggcacccgccaccacgcttggctaattttttgtatttttagtagagatggggtttcactgtgttagccaggatggtcttgatctcctgacctcgtgatccgcccacctcagcctcccaaagtactgagattacaggcgtgagccaccaggcccagcctggccaggctggtctcgaactcctgacctaaagtgatccacctgcctcggcctcccaaagtgctaagatgagaggcatgagctaccacacccagcctgtcttgagttactgtcagaaaacgtacactgctttttgaaacttgcttcagatatatcacttctcatatcaactttactctaaaaaaatttacttactatatccattcagtgtttccagagtgaattttctgattcaactaaaataaatttaaatgaatgtttcctcatactcactatattctaataattttcattccagaataaattatcatagatttgcagtcagagaaattgtgatggtggatttcattatattagtaaaatctgcataattaaatgttcttatataaatattccaagagtagtaatgaaggtgataatcatgacagccaatatttactgaatagtttctatttgccaataactattcccaaagtctttggataaactcatttaatcttcacaataaccttatcacaatgtaagaaatttgtaatctgaagtatacagtttaaattacttggtaataaaacagacgtggaaactggtgaaagtataatgatgctgaaaaagattcgtgtaatagataaaagcttttctacattcacaaagtcaacatgattattctctatatgctattctctataagtcaaataaaattttagtggtaatgtttttattaataattgatattctattttttccatataaattctgatgcttaataaattgtgaattatgaggtaaaaaaatttacagtcactggattttcttcacttacaaattgtttgctattccataattgataatttcaaaatcaaggatttcctatattaatcacactatacattatataatgttgagtatattgtgagagtagatctttacacatatcgggctttcattaggcttctcacctgtacaaattctgttatgaaaaagtatagctgagggacaggtaaaagtgtttcccacatttcttatatttctgaagtttctctgcaatgtgaatttggtgatgttagataaggattgttaaataaaaagacgctattcaaatacataagatttgtcccttcatgtatgtattctctggtgctttttcacctatgaaagacaagaagaggccttctcacattcattacattcatagggtttctcaccagtaggaattctttgatgttgagtaagatgcgccctctgcctaaaggccttcctacattcctgacattcaaagggtttctcaccagtgtgaattctctggtgttaagagttgaacaatcaataaaggattttctacattttttacactgatacggtttctcactagtgtgaattctctgatttctattaaggtaggaaacaagcaaaggccttcccacattccttaaactcatagggtttctcaccagtatgaatattttgatgttgactaagatgggctctctgcttaaaggccttgctgcattcctgacattcataggtttctcattagtatgagttctatagtgttgaataaatgttgaataacaaagaaaagcttttttacaatctttacattcatagggtttgtcaccagtgtgaattgtctgatgtttattcaagtttgaaagccaagtaaaggtctttacacattccttacattcatagggtttcacactggtatgaattctttgatgttgagtaagagttggataattattaaaaaccttcccacattctttacactgatagggtttctctcctttgtgaattctctgatgtctattaaaatcaaaaaaacaaatgaaggcattcccacattcattacattcatagggtttctccccactgtgaattctctgatgtctcattagatgtgcattatgcttgaaggccttcttgcattactgacattcataaggtttttcattagtatgtgttctctgatgttgaacaagtgttggacaggagacaaaaaccttcccacactgcttatattcataagccttctcaccagtgtgaattctctggtgttgaataagagctgaacaattgttaaaagctctaccacattctttacattcatagggtttttcaccagtgtgaattctctgatgtctattaaaatcagaaacacaagtgaaagccttcccacattacttacactcatatggtttctcaccagtatgaattctttgatgttgagtaagatgtgcactttgcctaaaagcctttttacattcctgacattcataagatttctcattagtatgagttctctggtgttgagtaagtgttgagcaattattgaatgctttgccacattccttacattcaaaggacttctcaccagtgtgaattctctgatgctgaataagagttgagcgattgttaaatgccttcccacattctgtacattcgtaaagtctctcatcagtgtgaattttccgatgtctattaaatcagaaacagaagcaaaggccttccaacattgcttacatttataaggtttctcaccagtatgaattctttgatgtcgaataagatgtgcactccgcctaaacgtctttctacattccagacattcatagggtttctcactagtgtgagttctcttatgttgaatcaatgttgaacaacagataaacactttcccacattctttgcattcatatggtttcccaccagtgtgaattcgattatgttgggtaaggtgggcacgctttctaaagggctttccacatatctgacattcatagggtttctgattagcatgacttatttgatattgagttagttgaaagttacaagcagtctctgccacattctttaaatacattgcatttctttgcattaaaatttgtctgatgtttcatatgatttgtgcaaaatacagaggtgttcccacacatttcgtcaagcttgtcactgatatgaattcttccctgttgagtaacattttctcatttttttttttgttcatagagtttctttccagtatgaattatttgatttagaagaaaatatgtaggctggatgaattcggatattttttcaaatggcacagttacatgcctgaaatattcctctgtagtttcctgttgtctctcaaagagtcctttgcatttccaatcatttcccaaaaaagattcctcaaggcaagaacttctgacactttctattattttccattttaatgattccttttcaaaagtgccattcttaagagttaactccttggtctcatatctagacagcatatcttaaagaaaataaacatcatgttttcctcttttatgagaaataaaactgcatagaagcagtcaaacagataatattgcccttaagcaagaaatggcttagataacttttaaatcttggcatttaatttgcagaaaaaaattgttggaatggctatattaatatcagatgaaacagacttcaagttactctatattatcaaagataattttctcataatgataaaagagttataataactcatcaggaagacttggcaatcagaaatgtgtaggtgcagaataacagagcctgaaaatatatgaagcaaaaattgacaaaagtaaagcaggaaatagataattctacaatcatagttggagattttgcaaccatctctcaataactgatagaacgactggaacatccccctcccccagaaaattagtaaagtaatagagcatataagtaacactgtccaccaccttcaactagttgatatacacaaaacacaatatcaaaaactgcagaatgtacattctcttcaaatacctatacattcaaaatagaccatatgctgggacattaaacaagtctcaatacactaaaaaggatcaatgtcacacagaatattttctttgatcacaatggaactcagtttgaaattattaaaatttctggaacctgtcccccaatacttgaaaactaaagaatacacatggaaattagaaaatacttagaaatgaacaatataaaagtatagcacaccaaaatatgttatatagctaaggtaacatttatagtgaaacctatagctttaaatgcttatattagaaaagaaaaatgtataaaataaacaacctaaggttttactgcaagacagtagataaagaagagcaaagcaggccaggcaaggtggctcatgtctgtaatcccagcactttgggaggccgaggcaggtggatcacgaggtcatgaatttgagaccagcctgaccaacatggtaaaaccccgtctctactaaaaatacaaaaattagccgggcgtggtggtggatgcctgtaatcccagctactcaggaggcagaggcaggagaatcgcttaaacccaggaggtggaggttgcagtgagccaagatcgtgccattgcactccagcctgggcaacaagagcaaaaactccatctccaaaaaaaaaaaaaaaaaaaagagcaaagtaaatctacaattagtagaagtaaagaaataacaaggataagagcagaaatcaatgaatgagaaaagtgaccataacagagataattaatagtcaaaaactggtttatggaatagattagcaaacttgataaaccttggagccaaactaccaataaaaaacaagaagaaaaacacaaataccaggaacaaaaaggggtttctaattataaaccctacataaataataaaagtaaaaattaaacataattacataagaaaatatgaaccatttaatatccagaagtataagaagttagagaaaatggacacattctttgaaagacacaaactaccaaggatcagtcaagaagaaataagtaaaacaagccaggtgcagtggctcacatctgtcatcccagcactttgggaggccaagacagatggatcgcttgagcccaggactttgacttgacaccaggctagccaacatggcaaaaccccatctctacaaaaaatagaaaaattagcccggcatggtggtgtatgcctgtagtcccagctacatgggaggctgagcccagaaagttgaggctgcagtgagatgtaatcatgccactgcactccagcctgagtgacagagcaagaccctgggagtgagggagggatggataggggggagggatggagggagggaggaagggagggaaggagggaagggaggaagggagggaggaaggaaggaaagaaggaaggaaggaaggaaatagctgtctatttatcactgaagctgaatttatagtaaaaacattgccccaaggacaaacatggcccaatgactttaatggcaaatcctatcaaatagtcaaagaagaaataactcacagctaattacagaagcccaccactaccctgcaactgaaaccaaaaaaccattcaaaaactacaaattttcctcctgaatgatcatgcaaaaatccttttaaaataatagcaaatagaatccaataatatatatattaaatccataacacaacattcaatggcatttacctcatgaacaagtcagcttagcatttgaatatcaattaatgtaattcaacatattaacatattttaaaagtcaaatgacatgatcacttgaataaaaacaaaatactcttaaaaaattcaacacagaatcatcataaaaattcttgccaaactaaaaacagaaggaacttactttctcaagtaaaggacatcattcaaaaatctacaagaaatatcgtagtcagtaaaaaaaatattgactgggcgcggtggctcatgtttataatcccagcactttaggaggctgaggtgggcagatcactcgaggtcaggaattcgagaccagcctgaccaacatggtgaaaccccatctcgactaaaaatacaaaaattagctgggcatggtggcacacgcctgtagtcccagctactcgggaggctgaggcaggagaatcacttaaacccaggaggtggaggttgcagtgagccaagatcataccactgcactccagcctgcacaagagggtgagactctgtctcatcatcataataataaagaagtcttttttccttagatcagaagcaatgggagtgattaataggtttttttatcttaattatggtgatggtttcatgagcaaacatgtacacatataaagtataccatttcacacatcaaaatttgtcaaaccatgtactttataacatagctggttcattatatgtcaattatgcctcaatacatctgctataaaaaaaagttctttgtaaatatttgaaatacttcccatttgtcaaactttttctcccaagaccttgggcctctgagggaaggtttccacacaatatctcaaacaaaagacatcaccactctgaccagtttgggcttccctaaaatgcacttctgctgggagtaccccaacacccttacccacctggataccaccctgttttcccagccatccagggttctttcccttgttccaatagggaaatcactgatggcttagaaatggcaagtcctgctcaaagaaataggatactaaaaataaataagccaaaaaatgttcttatttagaattggtttaacctaaagctaattcaggttcctctgaagactgatggaaacagaaaatcataatttggcaaacaccagaggaaataactactgtcagagccaagtgtagtggcacacgccagtggtcccagctacttgggagtctgaggcgggaagactgcttgaatccaggaggtcaaggctataatgagccaagatcatgccactgcactccagcctgagtcacagagcaagaccctgtctcaaaaacataataaccataactgttctctgcaggaatcactgatgaaactaaagtgataaaaatgtcatgagcaagagggtatttgtagagcctcaaatttctttacaagttacttactgattgcaaaggtaaaaatagtggctttactatgcggaaccctagaggataccatttcaagcatcaaaacaagatactgtttttgattggccattatttatgtcctgatacaatgcactgaaaaaggcatcacttctgtagtattcttcccaaaaatacataactttaaagtaatcataaaaatatgggtcaaggccgggcgcggtggctcacgcctgtaatcccagcactttgggaggctgaggcaggtggatcacgaggtcaggagatcgagaccatcctggctaacacggtgaaaccccatctctactaaaaatacaaaaaaattagccgggcatggtggcgggcgcctgtggtcccagctgcttgggaggctgaggctggagaatggcatgaacccgggaggcggagcttgcagtgagctgagatcgcgccactgcactccagcctcggcgacagagcaagactccgtctcaaaaaaaaaaaaaaaaaaaaaaggacaaatctaaatccaggaataatctatgtaataacaggccagcacagtttaaaagtgttaattagggtcataaaagagaaaaaacatttccaagattgaagagggctacagatacaagacaactaaatgcaatgtgggatcctggatcagtacaagtgggatcctggatcagtaccaggataattaatgacatttgaaaaaaggaaatagataacttaatattatatcaattttactttttggtttagatatttgtactatgcttatgtaaattattagcattagggaaaactgactgaagagtagatggacatttggcatactggttagttctagctctcgaaatcatttcaaaataaaaagttttggccaggcatggtggctcatgcctgtaatcccaacactttaggagggcgaggcaggctgatcatgaggtcaggagatcgagaccatcctggctaatacagtgaaacctcgtctctactaaaaatacaaaaaattagctgggcgtggtggcacatgcctgtagtcccagctacctgggaggctgaggcaggagaatcgcttgaactcgggaggcagagattgcagtgagccgagattgcaccactgcactccagcctgggcaacagagcgagactccgtctcaaaaaaaaaaaaaaaagtttggctgggcatattggctctcgcctgtaatcccagcactttaggaggccaaggcaggaggatcacttgaggccaggagtttaagataagcctaggcaacatagcaagaccgtatctctacacaaatttaaaaaattagctgggcacggtggcacacttgtagtcccagctacttgggaggcagaggtgagggaatcacttgagcccaggagtttgaggctgcagtgagccacaatcataccactgtactgtagcctgggtaacagagtgagaccttgactcaaaataataataataataataataataataataataataataaataaaatttaaaaatgggccccagagaagcttttggataaaagaatgatgaagacgtcagaatacattcacattaagctgacctaaggaacacaaggaacaaagagacaaatgaggcagaaaggtcttagttaaatttaaatctacgtgggctctatctctacttatttgggtaagaaaaagcaagaagcctcaagacagaatcaatgtgtcttcctgtgaaatgtcaaattcctagaatgtagctctcaaacataaacataacagggtatgtgttttcctaaattgtagatgaaccatcacgtcttaaatcctacaggttattatataaatgtccctcgaccatcatctagctccttaaaaatcaagaaaaaactcagttacataaggagcccagggaaagagtgaaggtcagtgaagaacaagaaatatgaaggtgcttgagagtagcaatctattccaagaaaacaaaactcaaaccagttttttggaacatggaacagaaatttagatatttaatgcagccccagaattcccagtggagagaatattttctgaattacagggaacaggtgatcttacccggtgacacaaagttgctgtagttctccaacatgacatctctgtacaagtctctctgagcagggcccaggcattcccactctcccttagagaaatctatagccacatccctgaatgtcaccaatcctttaaaggaaaagtccatttaacatatgtaataataaagaaaatatattttaggtgaatgataaggacataaaaagggattttcctagaaggcattctatagtaagcagtaggttgaaattggaaacttatggaggcggcaataaggaaatgaatacacacatattgttgagcagtcctgtgctgtgaggtagatacaacatcctgccactgtgggaaatttctattaatcggaacatgttgagaagccaacagtgtaaaacaatgtaaattgaaactgggccaggcgcagtggctcttgcctgtaatcccaggaccatgttttatttctcctaatttgaaggaacttaaaaggctgaaatgcaaagatgacactgagaaacctgatcttgaatcgctaaggcaacagcctgacaaattaatcaggatgacgaaccaagctaggaccaaggctatatccatgtgtgtgagttaagaccagggatggaaaagaaacatttctaggactccttgacatggagcccagtgcagtgtgattccaaaatctgttggtgataccctaatagggactacagttagattgggaggatatggggatgcagtggttgattgttattaaggtgaaagtttaaatgaaaactagaaggtctgaatggaccttatgtgaagtggttacatctccttacctgaatacataatggggaagggtattatgtctgactgaggaacacttctcctacctagtattttaaaactaaaggcatgtaagtttgtccttcaatcaatgttattagacaggccaaacaggaacctatagaattgctgaagcccacataggttgttaattttttttttttttgagacggagtcttgctttgtcacccaggctggagtgcagtggcgcaatctcagctcactgcaacctccatctcccgggttcaagcagttcttgtgcctcagcctcccaagtagctgggattacagacgtgtgccaccacgcctggctaatttttgtatttttagtagagacagggtttcaccatgttggccaggctggtcttgaactcctgacctcaggtgatccacccgccttggcctctcaaagtgctgggattacaggcatgagccaccacacccagcctatgtaggttgttaatttgaagctgtatagaatacctggtagatacaagagattaccacttcattaataacatgttagaagctagagtgctggtaccaaccaattctctatacaataaccctgataggtctgtgccaaagggggagactaacagtagattgtcgaggcttgaatgaagtagtaccaccgaattaaaggacaccagtactctgactaatcttgcaaatgcttttttcattatcccaatcttgggaaagagacaaccatagtttgccttcatgaggggacaatcccaatttatatctactgtattctcacaggttatttgaattcactagcttactattacaatttgattaggaaagcgtggacttgagaccagtcctaagtgtaacaatatactacattgatgataatgataacatcagaacctgaagaacaaattaggtctgatttccagcagggaaggcccacgcggagaggtagcatagcatgtagactctatccgatggccactggtagccctgggagcctacaaaaggatcctggcagtggatagacacacttcccctgtggtagatgtaaaggctcaaaatactataaaactccttgaatagaaacgtgccaattggcattgctgtgttatatttattcagaccaaaagaaacactttacaccccgcagtgtccaacaatgtccaaagagttctcacatcaattggatataccatgatgcatatcatcctcaaagtagtggtttggtagacaattagaataggagagctatagagttgttggctaaagtaagggaaagtaaagtatgggctggcttgcattccttcatgaggatgtgcttactctcaagatggggaaagccaaagacagtctccactagagagattcctctactgtcgtgggcaattaggaggagagggtgcatggcagaatgctggcacagttacacaaatcttccccaaataacctcaactttcttttttcctacctgatgcagtggccctgggactatgactgtaactccaagtgacagaagcaggggtgatccctaaacaagaaactggaactttacctttcaatcttttttaaaatgttatttatttatttttagagatggggtcttgatagttgtccaggctggacttgacctcctgggctcaagtggatcctcccatctcagcctcccgagtagctgggactgcaggcacataccaccatacctggctaatgaagtaacagtgaaaaagactggcttcagggagaatttaaccaaccatcagctaatttctacgctcaatagttctgtacaagtttatcatgtggcacataacagtagattcaaggagggaaatgagtaatcaaattaatacaaaaatatgagaatgcatgtaatggctttattggataggttagttgtttctttaaatccattgctactccatactggctccttgaaatgatagccatctacatcctgatactattgctgtttctgtgtagctgctcaggtagttttgctacaagagagcctaagccaaggcctgggtgagtggacaggtaactcagtacacctggaatgctcaaatcctgcacgtgccaaagaaagaactggcccttgactggctcttgggagataacctctgagcccttaaaatatcctacctgataagattgtttttgtatgccacaggccttggagcatgctgtatcagtttgacatctggggaactggagactgagtagctaaagtcaggtattgagtgataaatccctgcaagactgactccccaataaaaactctggaaaccaaggctcaagtgagcttccctggctggcaatagttcacacaatgttgtgacatgtcattgttaggagcattaagtgtgtccctgtatagctcctctggaagcagccacctgaaagcttgtacctggtttctcctaacctttgtccatgtaccttttctttctggtgactttagtatgtatccttttactagaataaaccataactgtaagaataacagcttttctgcatcttagcaaatctttgaggctgatagtctctaaagttcttagtacagtttctcttttcacaaaataaaatggaacatttgagggaatcttcccaaaatatcttattaaaacctctatcgtgtaatgaatatgttaattagcttgatagtggcaatgacttcacaatgtacatttctatcaaaagattaaatatataaatatatatttaaatatataaaatttttatgtgtcaattatacctcagtaaagatgggcagggagtacctccatctcagcggtccccaacatttttggcatcagggactggtttcatgaagacaatttttccacagagtagggacagggtggtttcaggatgattcaagtgcattacatttattgtacactttatttgtattattattacattgtaatatataatggaataattatacaactcagcataatgtagaatcagtgggagccctgagcttgttttctgcaactagacagtcccatctgggggtgatgagagacagtgacagatcatcaggcattagattctcataaggagcccacaacctagatccctcacatgcacagctcacaatagggttcacgctcctatgagaatcaaatgccgccgctgatctgacaggaggtggagctcaggcagtaatgtgagtgataaggagcggttgtaaatacagagaaagctttgctcacttgcttgccactcacctcctgctgtgtggcctggttcctcacaggccaaggaccagtactggtctgtggcccaggttttggggacccccgctctatcttaataaagaggatacaaataaatttgaagacttccttgcagaagatgcaaataaatttgaagaattctaaaacaacaactactaaagaaatttcaatagagaggtaagatgctacttgaaatcaaggatttgaatggtagagtgtagggaccagccccacagggtcggtgggtctctccctgtgcacggcgacgagagagtgtagaaataaagacacacgataaagagataaaagaaaaggcagctgggcccgggggaccactaccaccaatgcgcggagaccggtagtggccccgaatgtctggctgtgctgttatttattggatacaaggcagaaggggcagggtaaagaatgtgagtcgcctccaatgataggtaaggtcacgtgggtcacgtgtccactggacagggggcccttccctgcctggcagccgaggcagagagggagaggagacagagagaaagacagcttacgccattatttctgcatatcagggactattagtattttcactaattgactactgctatctagaaggcagagccaggtgtacaggatggaacatgaaggcggactaggagcgtgaccactgaagcacagcatcacagggagacggtcaggcctctggataactgcgggcaagcctgactgatgtcaggccctccacaagaggtggaggagcacagtcttctctaaactcccccggggaaagggagcctccctttcccggtctgctaagtagcaggtattgttccttgacacttttcgctactgctagaccaccgtccgctcggcaacgggcgtcttcccagacactggcgttaccgctagaccaaggaacccttctgctggccctgtccgggcataacagaaggctcgcactcttctcttctggtcacacctcactatgtcccctcagcttctatctctgtatggcctggtttttcctaggttatgattgtagagcgaggattattataatattgggataaagagtaattactagaaactaatgattaatgatattcatatatctctaagatctatatctggtataactattcttgttttatattttattatactggaacagctcgtgtcctcgatctcttgcctcggcgcctgggtggcttgccgcccacagtagagcaacaaagaaatatcatttcccagttatgagattagcaaaatgagacaactggttacaccccatatgattacatgagaaataatctcagggcatcctgcacataagattatatttagaaaaatgtatgagcatgtacaggcatgccttaaactcagcaattatacatcttagattctattcaaatgaagatttaaatgtgtacaaagaggaaacagtttaacaaaccattattgtattaatataatgaaaaacaagataatcataaaactgatagctttgccaggcacggtggctcatgcctgcaatctcagcactttgggaggccgaggcaggcggatcaccaagtcaggaaatcgagaccatcctggccaacatggtgaaaccccgtctctactaaaaatacaaaaaaaattagctgggtgtggtggcgtgcacctgtagtcccagctactcaggaggctgaggcagaagaatcacttgaacccaggaggcggaggttgcagtgagccaagatcatgccactgcactccagcctgggcaacagagtgaggccccatctcaaaaaaaaaaaaaaaaaaaaaaagatagctttggggtggggcgcagtgactcacacctgtaattccagcactttgggaggccgaggtgggaggatcactcgaaaccaggaattcatgaccagcctgggcaatgtagagagaccccctgtctctaaaatatatatatataaactagccaggtgtggtagcccacacctatagtcctaactacttgggaggctgaagcaggagaatccttgagcccaggacattgaggctgcagtgagttatgattgcaccattgcactccagcctgggagacaaagggagaccccatctcaaatctcaaaaaaaaaaaaaaaagtttctccttaatttgtaacatgaaaaatcttttacctcaattttctagtgaacagagagcattattaaacggaatagtcattgtcatcctagagttatcaaacagaagagtgactgtcaaccacttttggcagaaaacccacacgtgtgtggatatatataagatctggaaagatttttcgttgttgtcgtactataggtaatctttactttgtgattttccacattttctgaatttttgcattgaggatatactatcttttaccatcataaaaaacaccactaagcccaggcaacatggtaaaaccccatctctacaaacaatacaaaaattagctgggcatgatggtgcgtgcctatagtcccagctacacaggaggctgtggcgggaggatggcttaagcccagcaggtcaaggctgcagtgagccataatcgcaccactgcattccagcctgggagacagagtgagaccccatttccaaaaaagaagagtcaacaagttttaaaaaatcaagaagttcataaagtaaaaaaagttacagtaagctaaagttaatttattattgaagaaaaaaattttcacatatttagtgtagcctaagtatacagtgtttctagtctatagtggggtatggtactgtcctagccttcacattcactcaccattcacttactgactcacctagagcaactttcagtcctgcaagctccattcatggtaaatgccctgtacaggtgtaccattgtttactttttatacctttttttttttttttttttgagatggagtcttgctcttgtcacccagtctggagtgcaatggtacaatcttggctcactgcaacctccgccacccaggttcaagcgattctcctgcctcagcctcccgagtagctgggattacaggcacctgccaccacacccagctaatttttgtatttttagtagagacggggtttcgccacgttggccaggctggtctcgaactcctgacctcatgatccacctgccttggcctcccaaagtgttgggattacaggcgtgagccactgcgcctggcctataccatatttttactgtaccttttctgtatttagatatatttagatacataaaatcattgtgttgcaactatctacagtattcagtacagtaaaattctatacaggctggtggcctaggagctgcaggctatactatatagcctgggtgtgtagtaggctatcccatctaggtgtatgtaagtccaccctctgatgttcacacaatgatgacatcacctaacaacaacattacctaacaacagaagaatgtatccctgttcttaggtgacgtctgactgtatatctaacattaaaagtttatttacaaaaataaactttatttacaaaaaaactttatttaaaaattacatggcataaggccgggtggagtggctcacgtctgtaatcccagcactttgggaggccaaggtgggcggatcacctgaggttaggagttcaagaccagcctggccaacatggtgaaaccctgtctctactaaaaatagaaaaaaaattagccaggcatggtgatgggtgcctgtaatcccagctattcgggcggttgaggctaggggaattgcttgaatccagccagtggacgttgcagtgagccgagattgcaccactgtactccagcctggacgacagagaaagacttagtctcaaaaaaaaaaaaaattacatggcataacgcttacgacacaaaatctctttatctccagagtttctatgtattcaagatggttttctcataaaacagcagaggttactgtggtcagaatgtcaccttcccatgagcccacaaggaaaagcatctgtgtttcgctagttcctgtcacactttaatctatttctgtatagattatatgtcccttgctagattgagagaaacttaactagggctttctaatcacttcatttctcccaagtattagcacagaatcattgatattcctggcattaataaatgcttaatattttacctaaaaattctatacttgggaagttatcaataaacgaaacctagaaaagtgcaaaatttagtgaacacaagaatatatcacagaacagttacatgacagatgactgcactaccattaacagctatgaccaaacattttaagtaaaaaggaaagatatacgtgacgaattactacgtaagggggcaggtctttaaaagaacctataatttggctgggagtggtggctcatgcctgtaatcccagcattttgggaggctgaggcgggtggatcacgagatcaggagatcgagactatcctggctaacacggtgaaaccccgtctctactaaaaataaaaaaaaattagccgggtgtggtggcgggcacctgtagtcccagccactccggaggctgaggcaggagaatggcgtgaacccaggaggcggaggttgcaatgagctgagatagcaccactgcactccagcctgggcaacagagcgagactccatctcaaaaaaaagaaaaaaaaaatagagattgagaccatcttggccaacatggtgaaaccctgtctctactacaaatacaaaaattagctgggtgtggtggcatgcgcctgtagccccagctactcgggaggctgaggcaggagaattgcttcagcctgggaggtggaggttgcagtgagatcgcgccattacactccagcctggtgacagagtgagactccgtctcaaaaaaaaaaaaaacaactataattttagaagagcatataacacaataatttaaaatgcagctcagaggccagatgcgttggctcatgcctataatcccagaactttgggaggccaaggggggcagatcgtttgagcccaagagttcgagaccagcctgggcaacatagtgaggccctgtctctacaaaaaaaatacaaaaattagccatgtgcagtggtgcacacctgtagtcttagctactcgggaggctgaggtagaagtatcacttgaacacaggaggtcgaggctgcagtgagctgtgattgtaccactgcattctagcctgggtaacagagcaagaccctgtctcaaaaaaataaataaaataaaataaaatgcagctatgcttatagatgcctgtgatgtgactcttgataagtggatttttagaaagtcaccaaatgaagaaacagagagcacaccggagaagagctcaagtgaagccagactgcctggtttgcactccagttctgctgtgcaccagcttgggcaagttacttcacatctttgtgttaaatattctagcacatgaatggagaagaatgtttctagttctttccatttgggaggcacagattgtttgtaaggtcatatctatggttaaaccaggcatctttttaggccacagatgtatacctttgaagtcagaataaattctacacctctttcaggaaaaaaattttcaagggatttgtggccaatatatgaagtaaatgacctgcagattaaaaactcctgttctatactacttgagtgtctagctctttttcttatttgcaaatatctatcacaattaattttatatttttgttttccctgatccatagataacttagtacaaaatataatcgtaacagttcatgtattaataaattgaatatactttatgtgccaatatacctaagggctttacatgtatcaatttagtcattctaacaaacctacaggtgagtgctatcattccctccattttacagatgaggaaactgagatgcagagaattacatttctctagaacacagatattaaggtccccacatggcctaggaggtgcttgagtaaaaaaagaaaagcataccgccttttatggtccaggtagatatatggcctaaaacaaatcatgctggcaaatctcaagccaaacttgatcattataacaaagtggaaagtgcatttccgagaaaaaacaaacaagtagttaacagaagaaagaaatctcccctcaccttgaacatggcttttacatccacaatagccatgcttccctgctcctcagggcacctctggaaaaacacagactggagaaggagaatggaattaggagaaaccagttttgtgtcaatataaactgaggcctgttctccaggtcctctgcctgtgtacacagatagaagtcagagagagaccagcatcttttacttatctttgtgtcaaaaagaaaagtcaggatggaagctacctggagctgccacttctcagcggtctcagatacctaactgagatagtccaggcatggtagggcttctaggaagtgtaattttctccacagagcttccagaaggattcatgacaagggaattccgatttctggtgactctcaggtgtctccccttcttttttttttttttttgagatggagtcttgctctgtcacccaggctggagtgcaatgcacaatctcggctcactgcaacctctgcctcctgggttcaagtgattcttctgcctcagcctccccagtagctgggattacaggcacctgccaccacacccggctgttttttgtattttggtagagatagggtttcaccatgttggctagcctggtcttgaactcctgacctcaggtgatccacccgcctcagcctcccaaagtgctggaattacaggcgtgagccactgctcccagcgttctccccgaatctcctccagctctaaaattctagcccaagaccagagctgtgggtcagggttaatcaatcactattagctgtttactttcaccctgtagatcaatgatctggagagtctcccctaccccacagcatcaccctacccaatattaatctatcccccaaccctaaccacaccccacacacccatatctcatcccatgccccccacccctacagagacagtaatctcagggtgccactgaccgtagagagcttccgacattaccctaagaggtttctctctggatttgtccacctcatagaaataaaaaggaggactggatctccctgctgatttctttttttttttttttttttttttttttgagagacggagtctcgctctcgcccaggctggagtgcagtggcgcgatcttggctcactgcaagccccgcctcctgggttcacgccattctcccgcctcagcctcccgagtagctgggactacaggcacccgctaccatgcccggctaatttttttgtatttttagtagagacggggtttcaccatgttagccaggatggtctcgatctcctgacctcgtgatccacccgcctcggcctcccaaagtgctgggattacaggcgtgaaccaccgcgcccggcctgatttcaggtcctacggcctctgtaaactataaactcatgcacatagcacataacaactctatccaaactcctatggtaagagacttgcccaaattctagaatagcttccagcattttaagaccatgttcctaggctgaccccagtcccccttaaaatgcctgcctgacaacagacgcttgaaggcagcatgctcgttaagagtcatcaccactccctaatcttaagtacccagggacacaaacactgcggaaggccgcagggtcctctgcctaggaaaaccagagacctttgttcacttgtttatctgctgaccttccctccactattgtcctatgaccctgccaaatccccctctgcgagaaacacccaagaatgatcaataaaaaaaaaaaaaaaaaaaatgcctgcctgacaaagtttaatgctgcctggagaatttactatttgttccagctaaaaacctagtggtaggcagacaggcccctaaactcccttttaaaagtaactgtttttggccaggcgcggtggctcacacctgtaatcccagcactttgggaggctgaggtgggtggatcacttaaagccaggagttaatgaccaggctggccaacatggtgaaacaccatctctactaaaaatacaaaaattagccaggggtggtggcgtgcacctgcagtcccagctactctggaggctgaggaaggagaatcgcttgaatccaggaggccaaggttgcagtgagccaagattgtgcctctgcactccagtctggttgacagggcgaggctctgtctaaaaaaaaaactaactgcttaaagagggagttcaggggcctgtctggctaccgctaggaaagcttatcattataaatgctttctctgccctttgagatgtatacctaccatgtgccactcagaactatttcctcaaggacctgagatgcaaacattcagggacataactcccagcccctctggaagagtaaaggcctaactttggtgggtgcagtgctccaagctgcaccacttggccttctgtaataaaagatttgagaactttgcttgatacttaattatgaaaaaataaaattaaaaattaaaaagatctgagaactggctggtgtggtagctcatgcctacaatcccaacactttagggaagccgaggtgggagaatcgtttgagctcagtagtttgagaccagcctgggcaatatagtgagatcgatcgcctctacaaaaattttttttttaattaccagtttagtcacacttacctgtagtcctagctactagggggctgacctgggagtatcgcttgagcccagggtgtcgaggctacaggaaaccacaatcgcaccatggcactccagcctagacaacacagtgagaccctgtcttaaaaaaagaaaaaaaaaaagaggccgggcgcggtggctcacgcctgtaatcccagcactttggaaggccaaggcaggcggatcacaaggtcaggagattgagaccacagctaaaccccgtctctactaaaaatacaaaaaattagctgggcacggtggcgggcacctgtagtcccagctactcaggaggctgaggcaggagaatggcgtgaacccgggaggcggagcttgcagtgagcggagattgtgccactgcactccagcctgggtgacagagcaagactctgtctcaaaaaaaaaaaaaaaagaaaaaagaaaagaaaaaactctgtttctttgtttcttctccagaaaaatggcaattagcaaactaggtacatggaccaaactcccctttgcacccttcagtggcttttccctagcacacccccgcctttaaaaagtctccctttggctgggcacagtggctcacgcctgtaatccccgcactttgggaggccaaggcgggcgaattacctgatgtcaggagtttgagatcagcccggccaacacggtgaatcccagtctctactaaaaatacaaaaattagccaggtgtagtgttgtacacctgtaagcccacctactcgggaggctgaggcaggagaatcgcttggacccaggaggcagaggttgcagtgagccgagatcatgccactgcactccagtccagttcagttcacttccccattgcagcagctattacaggttgagtttcccttaaccaaaaggcctggaatcagaagtggaatctgaagatttcagactttttcagattttgagatatttgcattatatagcagttaatcctccctaatccaaaactccaaaatctgaaatgctccaataaactttcctttgagcatcatgtcagtgcacatcaagttctggattttagagcattttggatttcagattttttacattaagaatgcttaatctgtactgaataaaatctcttctcagctgggtgcggtggctcacccctgtaatcccaacactgggacgctgaggcgggtggatcacctgaggtcaggagttcgagaccagcctggtcaatatggcaaaaccccatctctactaaaagtacaaaaattacgtgggcgtggtggcgagcgcctataatctcagcttctcagaagactgtggcaggagaatctattaaacctgggaggtggaggctgtagtgagctgagatcgtgccactgtactccagcttgggcaacagagcgagactctgtctcaaataaaataaaataaaataaaataaaatttcactgctttagtgtctgtttatctttgaatcatataaacagaatcatatactatgtagtattttgcatctagcttctttcacttagaatttttaaggttcatccatgttgtaacatgcacaattgctaagtaatattctttattaatatttttaatgtttttagagacagggtctcactctgtcacccaagttggagtgcagtgagctgggactacatatgcatgccactgcacatggctaaaaattttttttttttaattattttctatagagacaggctctcaccatgttgcccaggctggtctcaaactcctgggctcaagcgatcctcccacctcggcctcccaaagtgctaggattacatgcgtgagccaccgcatccgtccaaatattttctttcattacatcttttagttggctttaaaaaatatataaataaagactacaaatttccagatcctaattttgtactcaatttctttataattttatcattgggccaggtgagatggctcatgcctgtaatcccagcactttgggaagctgaggcagacggatcacgaggtcaggagttcgagaccagcctggccagtatggtgaaaccccgtctctactaaaaatacaaaaaattagccgggtgtggtggcacgcacctgtagtcccagctattcaggaggctgaggcagaagaatcgcttgaacccacgaggctgcagtgaaccgacctcatgccactgcactccagcctgggcaacagagggagactccgcctcaaaaaaaattaataataaatttatcatttaaatttacgtgcagtcaatgttttgaaatacttggaggatctttgagagaagcataggcttctttacatcccaaagacattgtggcctggggaaactggaacaaattagccgaatgaatctggtactaggctcactgaggaatggtgaagccttaaaaggctccaggacttctctgaacgaaggtttgcttttcagaaagtggagttatagcgccttacctggaatcttgaaccccaaattatgatctctccacggtagtcaacggagcttcataaattattccttaatccgaggcttctcaaatctgttgtgttccctaaacaacagaataaatgcctactctgagggtctgacacaaaagcaggagtcccacaaaataagttcctttaaaatatttcttcttgtatttaaaagtcacactgatttggtattctatacaataataaatttatcttttacacagaaatcctgttttatagtatttatcagatcaattatttagccttttccaaattttcgagtaaactgacgtcctggaagaagcacccttattttcaccattttacagtcgaagaagggaagataagaggcggtgaatccgagactttcattcaggtgacgatccctcgcgggcactcactctcgctcacactacaatcagatcctccatgcggctttcatatactctgtcacactcgcagccagaatcccctcggatggactcttgcaaacctccagccccatcccgggatccgtgcgtcttctacagccaccacttgggccagcgtccaggacgcccaagcgtaacctccccactctaaaccgttaggaatcagtggctggactcaccgcgtcataaaagcataaactgtgacccgatgagtccgcgcactcggaaaacaagagaacgctcccacgtctccgggcgcagcttgtgccagcgactactaggtcagggggcgcagctgagagaattcaagcaacctccccgcaaccggttccgccgcgtttgtgggctggtagcccggaatacatttcccagaggccttcgcggccgacgtgcttcgcgcaggaacgcagccgcctcccgactggaggacgcggtagcggagctgctcaaagcgaggtgctcagccctgggaggctcagggctgcccgaggggcttagtcccagagccagtgctgtcaggggctgagcatgtgaatagggcagtcggaagaccatgtgtgtctgtggcttttaaatacaccccgaacgtctatctcttttaactggagtatttaatttatttacatttaatatagccactgatagatttaaagctgccattttattatattttcttttttttttttagtgctaaatacacaggcttttattttcttcatattcaatctttttgtgaatttaaagatgaggaggccgggggcaatggctcacgcctgtaatcctagcactttgggaggccgaggcaggcggattgcccgagctcaggagttcgagaccagcctgggcaacatggtgaaaccccgtctttactaaaatacaaaaaattagctgggcatggcggcgtgcgcctgtagtcccagctactcgggaggctgaggcaggagaatcgcttgaacccgggaggcggaggttgtggtgagccgagatcgcaccactgcactcgccggggcgacagagtgagactctgtctcaaaaccacaacaacaacaacaacaacaaaaactatattaatactttaataccctaaagataatgagacaaacgtgcatttgtggaactgcatgtcaatcaggccagttccctgcagagggaactcccagcatgacctcagtcatctgtgaggacacagagcagtccttgtttagacacacactttcatctactgctgcagcatggtcagcactccacttcttgatggtttccttctgctatgaatatgcatgtccagttgcttcttagagcagacaccttcctcatccaccagccattggaggaggactggggccacccagatgattgattggacccattcttccaggagggtttcccggtggccctcttccatcgtcatcgtatctgaaatcagatgagtttccatagcttcttctttttttcaaatcttgccgaagcagagttttgaaaaacaaaaccacaaactcagctattccccagaagaaatctgttatcaaagataatctccatggagactgactccagttgtccaacacttgtgcgtttgagatgtaaaccatcttgcccccattccctgcttcggagccttatttattactttttaaaaacagggtctccctatgttgcccaggctggccttgaactcctgggttcaaacgatcctcccgcctctgcctcccaaagtgctgggattacaggcattagctcctggcattttaatttgttttctttttgttgcatgtttcctttttctctcctttctttatgttggattgatgtattactattccaattttctctttaatagtttgtaggttctttaagtcattactccaggaattttaataagtccaaatttatcaatactctgactctcctctcacagaatgcattcaatttcatatgccctcttaaatttaaaatacaagatatcagttacatattcgttttgtttaaaaaaacctctctaggctgggcgtggtggctcacgtctgtaatctcagtactttgggaggccgaggtgggccgatcacaaggtcaggagatcaagacaatcctggccaacatggtgaaactaaaatacaaaaattagctgggtgtggtggcgcgtgcctccacacccagctaataccagtagaataccagctacacaggaggctgaggcaggagaattgcttgaaccagggagtcagaggttgtggtgagctgagattgtgccactgcgttccagcctggtgacagagcgagactccgtctcaacaaacaaacaaaaatctctctgatgttatactattattttgtcagtattcatttacatttactcagaacattaacataaatataagtggtgttcaaataaacagaatgtttaggttttgtcaaagagaaatacagtggggctgggcgcagtggctcatgcctgtaatccagtgctttgggaggttaaggcagctggattgcttgaggccaaaagtttaagagcagcctgggcaaaatagtgagaccccatgcctacaaatttttttttttttaattagctgggcctggtggtctacacccataatcccagctactctggaggctgaggccagaggatcacttgagcccaagagctatggatggcatgactacactgcagcctaggccacagacctagaccctgtcttaagaaacaaaaaggccagatgcagtggctaacacctgtaatcccagcactttgggaggccaaggtgggcagatcgcctgaggtcagcagttcaagaccagactagccaacatggtgaaaccccgtgtctactaaaaatacaaaaattagccaggcgtggtggtgtgcacctgtaatcccagctactcaggaggctaaggcaggagaatggcttgaacctgggaggcggaggttgcaatgagccgagattgcaccattgcactccaccctgggtgacaagagcgagactccgtctcaaagaaaagaaaagagtccaagcgtggtggcgtacgcctgtaatcacagcactttgggaggccgaggtgggtggattgcctgaggttatgagttcaagcctggccaacatagtgaaagcccatctctactaaaaatataaaaattagcggggtgtggtggcacatgcctgtaatcccagctacttgggaggctgaggcaggagcatcacttgaacccaggaggcagaggttgcagtgagccgagatcatggccactgtactccagcctgggccacagagccagactgcatctcaaaaaaacaaaaacaaaaaaaaaaaaagaaaagaaaaagaaacaaagtgagacaatagtaaaaggcagtaaagacagattttattcagtaataactactgcattagggaacagaatccagtgtgaactgagctccactttgggaaacaaaaatcaggagttgttgaaaatgttggggtgtactaaagaagacactgaaaggtgttacgggggagtttggtccatatgactaaggcatcaggtttttttttttttttttttttaactaattggtatttatccagagtagaaacaaacttcttgtatctttacgactgaggtagttgtgaaagttggagcaagacagccaccaaagttaggcccttacactcccacagcaactgagaggctggagcaagagctggctctctgaatgtttgcatttcaaactcagctgaggagacagctcttggtggtagatttgcatctcaaaggggcagagaaatggtttataattgcaagctttctaaagtaactgctttaagagggggcttaaggacctatcactatttacaggttttggctggaacagtatgttttcagaacagcattgagctttctcaggcaggtttttttttttttgagatggagtcttgctctgtcacccaggctggagtgcagtggtgtgatctccgcgcaccgcaattgccacctcccgggttcaaacaattctcctgcctcagcctcccgagtagctgggattacaggcgcctgccaccacgcccagttaatttttgcatttttagtagagacggggtttcaccatgttggccagtctggtcttgaactcctgacctccagtgatccacccactttggcctcccaaagtgttgggattacaggcgtgagccacactgcccagcttacatctgaatttcattccaggattaagtgtctgattcacctaaacagatcggaatgaaagccctcttatggtttttacttattatctgtttacccagaatgaattcaaatttaaaaagcataaaacttttttgaattcattaaacttgaatggttaatggttttcatttcgtcaaaatgcactaaaaataacacaagtaatgatattattatatacagaagctaatgtttattgaacgtaacagtatatttcatgtagtttcccataattttttcatgtactaactcatgtaattctttgttttttagagatctgaagtgattttacctttacttccttcactttaagccaatcatgaaatttcagtgatttctggggtgagggcgaaaggtggtgttacgaatcatcggggctgtggcccagttgcctcacggaggtgcaggtaggctggggcctcactagggcagctggaggagcacggactgccctgccggcaggcaggtgatgttccgagagcatgagagctggtatgcaatgtcttctgcagcttccagcttgcacagctcgctctggccgtcccctgcagtggccagtgagttggcgatcagctcagctgccttggagtcaccctcagcagagatgatggccgccttttccaccacaaatctggcgctctctgcttcctggggggccacctgtctgttaactccttcaagaaggtcagatgtgtcaaagacacgtcgtccagaatgagcccaaaggtggctgctcactccataaggttgttgctcacctggctggagaccagctccctctgggtgattagttctccagcatcaaagcgagccaccagtgacttgaggatctccgtggtaatgaacggcagcacacactcatcgtagtcctctccaatgctggtgaagatgcgaggaagctggctagtgatgggccggaagaggatgcacagtgtgatgttgacattctgtaaatctttgctaccagtgatgactggcgcactacgtggttgagaacagcagtcaaagataattggtttttgtacacatgggatgagaaagtgagtcccttcccctaccacaatgttctgtactccacggaattggtcaaagatggcagctctgtgcccagcatccacattacataaggcagagttcaccatgcctcctgcaacagctaaggccaggccaaacttgccgatggactcaaacactttggcagccatgttttcttctgcgggaccctctcacacctgcttccactctgacctccacatctaactcatgtaattctaacagcactatactgtaggtactactatcatcatttatatatgatccccagaagggataaatatcttcccccatatcatcccagctataggaagcagatgttgatcatgagcattaaatatgcagagtggctaaatagcctttcccatcatcgcttatatcaacagaggtttcctgtgtaatggctttttccaggtttaacaataaatgattgttgctggaagatgtttacatgcaagtataaagaatggtttcctacgttttctcagttttcctctactgtgaatattttggcaatccaaaactagaggaatatcagaaaagttttcttatgttattaaaaaaatacattataaattctctgaatctgagttaacacaggtcataccaaagaaactgcatatatgatttacattttgaaaagttcacaccaatacaaattgatgcctaataaaaactgaactgtatctcaaagccattccacattgtcttcattcaaattgttcagtgggataaatccattgacacaatgtgctttctttactacctgtatatgccacaatttctctatcaaatatgaattctctgatgtacttcaaggatggatctaagcctaaaggaccttctgcatttgttacatttaaagggtttctcaccagtatgaactctatgatgtatactaagttcatggctactattaaaagctttcccacactcttcacacatatagggatttccatcagcatgaacgctttcatgtctaacaagatatgaggcacagtgaaatgccttcccacatcttttacattcatagggtttatcactggtatgaattctctcatgaataataagatgtgaagcatgactaaaagtttccccacattctttacattcataggacttttcaccagcatgagttcggtcatgatatatgaggcttgtggcatgacgaaaggccttgccacattccttacattcgtagggtttctcagcgctatgaatattctgatgggctttaagtacagaaatgaacctaaaagacttcccgcatttgttgcattcaaagggtttcttaccactgtgaatactcagatgctgagtaagttgtccagatacactaaaggccttcccacattccttacattcataaggtttctcaccagtatgaactctgcgatgtatagtgagtttatggctataactaaaacccttcccacactcttgacatacatagggtttctctcctgtatgaattctctcatgtataacaagatatgaggcacaacgaaaggacttcccacattctttacattcaaagggtttgtaaccagtatgaattctgttatgatgggcaaggtgtgcacgctgactgaaggccttcccacattccttacatttgtagggtttctcaccggtatgaatattttgatgtattttaagggatgaattgagcctaaaggacttcccacatttgttacattcatagggtttcttaccactatgaataccctgatgtcgagtaagtcgtccatgcacactaaaggctttcccacattcctcacacttataaggtttctcaacactttcaaatgtatgaggtgcagtaagttgatggccactactaaaagcctccccattttctttacattcatagtgtttctcccctgaataaattctctgatgcatggtaagttgatacctacatgtaaagcccttcccgcattccttgcattcatagggtttttctccagtatgaattcttttatgacccacaaggtgggaaaactgacgaaaggcctttccacattccttacattcatgtggcttctctccagtatgaatactctgatgtactttaaggcctgctttgagcctaaaggacttcccacatttgttacattcaaagggcttctcaccagtgtgaatactctgatgtcgactaagtcgtccatacacactaaaggccttgccacattccttacattcgtagggtttctcaccataatgaaatctatgatgtacagtaagttgacggctagtcctaaaagcttccccacactctttacattcatagggtttctcaacatgaactttcccatgttgagcaaggtttgcaggataactgaagaccttcccacattcttcacattcataaggtttctcacgagcattaattttctgatgctttctaaggtctgtaagatggctaaatgccttcctaaacttttcacattgatcaggttcctcactagtatgaattgtttgatgtaccatgagttctgtaagatgactaaaggacttctgacattgcttacactcatatggtttctgtccattatgaattctctgatggagagtaacacatgagtgtttcctataaagctgcattttcccatcgctgattatttcacatcttgaatccaaatctagaagacataaaataaaaacattttattggatgagaaaatgtcaatgttattgtagaattaagagaaattctcacctattacagatgctaactcgaaaatacagttataaaatataaaaaatgaaaggagagctaaaaaaatgagtttgtgcagtggaatgcagccttacacacacaggcacacatacacaaagagacacacacacacacagagccctgttttgtagtgtttgccaagatctctggtgtaaatactcccactgagggcaatttctagctgtcaatttaatgcagatttattaatatatgtgcataactggctctagaatgacagaactgaccagctgtaccacaccccctgtatataaatttatatcatatgctaagaatacaggcaagtatcgatatggaaatagaagagtaaaatggaagaattccagcagattgaacatctgtaggaccagaagtaataagaaaatgtcagggtaagataactaaatagaaactcagtatcttatttaatatatagagaaaagtaggatacacggtcatgcatagaaaggaataaactacagtttcgggaacacccatatttcagggaagattttcattgaagaatgatcaggtttacagcatatgtcgatgtgatatacatggaaattataacataaagggtaaggaaatcatgacggagaaaatgggtacacatcataatcatgggcattcagtatcggcaggcagggagttcagagtgaatatttatctcaataaaaaggaaagaaaataagtaaaagatcactacccaacatttaggaatttaagagcaaggtacaggaaagcaggaaaataaagataaaagcagaatgtgatgggttaggaaacggaatagtgtcaacacctaaatcaaagacatggtgtttacaaaaatcatcgggtgaaatatgagctaaagcaaccaaaaaagaataaaaaataaaaataagaaacaagggaaaataagaaagagattttatttaaattatgagagtatatatacatattttgaaagtattaaaaacagtgaatgattttgtaggaatattcttcaaagatgaccctaaaagtgaaaagtctaaatagtcaattgtcatagatgaaatacaaaaagctgctaaaaagacagttaatatgagcacattttaccccctatcttgtaatttctcaatatctgaatttttaaaatgtgcacataagatattccagagaaacaattcaggaagggaacaggtaacatgaacctgaaaatataattaaaaaaagaaaggaagtcttcaaagacttagagttgtgagtaaacaaaacaataaaaatagtagtgttgaatatgaattctaaatttctcttcaaagaattaatctatcagtatgttcaatctttgccttctacatttaaacttaacttcctctaaagcaacctttttcgattacctactccaccctaaatcattctgatcacctgctccaccctaactcattccagttacctactacctgctctgccctgactcccgccaaagcgctcaccctgtcattctctttaaattagccaatcagaattagtttagcctgtgcggtctaaccctagccaataggggaacgacacagcagcaggggacacgtgcgtcagggataagaaccccttcccctcccttgtccaaatgtgtgcccaccattgctccatcggtgaaagcgcacacttctatacaagtaccttaccttgctgaaaatttaaaaaaaagaaaattttatattcgagtgctatttcttttgcagcatcgaaactttatttataacagtagcatacccaggtttggagccaggctcaatggctaatgcctgtcatgctagctaatatgattgcaacatcagaacattaagacaaagcttagaaaaacacactggaaatgatggacaacataggagatataaccatgggggggagacagaaaaggatgaaaatgcaaattatacaactgaaacatataatcactaagagtcagtaaacttgattgatcaatagaaattattcaacttgaaatggagagagaaaaatggtttaaaaaattttagctgggtgtgatggctcatgcctgtaatcccagcactttgggaggctgaggcgggtggatcacctgatgtcaggagttcgagaccagcctggccaacatagtgaaatcctgtctctattaaaaatacaaaaaattagctgggcatggtggcgggcacctgtaatcccagctactcgggaggctgaggcaaggaaatcacttgaacctgggaggcagaggttgcagtgagcagagattgcgccattgcactccagcctgggcaacaacagcgaaactccatctcaaaaaaaaaaaaaaaaaaaaaagaaagaagaaaaaatgtgtaaacagctgtgggaataaatcaaaagatatgattgaaattataaactaaaaaacaaagattttggcaggaaaaatatctcaggaaatagcaattgaaaacatctcaaatttagtgaaagaaataaatttgtagaattaagatgctcatttaatgccaagtaagatatgttacatttactgataaaagcaaattagtttgttgccatcagacttactatacaaaaaatgctaacaagttatttaggcccaaagaaaatactatcagagaaatctgaatcttcagaatataagaaaagcatcacaaaagatgatgtaaataaaataattttttgctccttaagttctttaatatgactgttaaaagcaaaactaataacactgcctagtgaggtttacaacatatgaagatgtgatatacatggaaattataacatgaagggtaaaggtggatataaacctataaaaatacaaggtttatacatttgttgagaaagaacaattctatctagctggcgaaacgtcatgtatattgtatactataatacctataacactacctaaaataaattactcaaggagatacaacccaaaagtcaacaggtaaatttatttatttatttttatttttactttttttttttgagatggagtttcgctcttgttgcccaggttggagtgcaatggtgtgatctcggctcactgcaacctccgcctcccaggttcaagcaattctcctgcctcagcctcccgagtagctggaattacaggaatgcatcaccatgcctggctaattttgtatttttagtagagacggggtttctccatgttgaggctggtctcgaactcctgacctcaggtgatccgcccgccttggcctcccagagtgatgagattacaggcgtgagctaccacaccccaccaacaggtaaatttaaataaatagcaaaaaaaaaaaaaattgaaataatcaaaattacaaaaggaatggacagagaaactaaatagagaaaaaaagtaaagtagtagacctaaatgtaatcatgttaataattacataaaatgtttagggtcaaaacactttaattaaaaggcaaagattaacatagtgaatgacccatcacctcacacccatcaggatggctactggtaaaaacaaaaacaaaaacaaaacagaaaataactaatgttgaagaggatgcagagaaattggaacccttatgcactatgtaatggctacaaggaacatactttaaagacacaaaatattaaaagtaaaaagatggaatcaatataacaaaccaaaaaaatggtgggctatattaatatcagacaacatagatttcaggacaaagaaaaacaggaggactcaagaaggtgcatgtcgtaacataaaagggatcagtctatcaagaaaacataaaaatcccaaacacttatgcacctgataacagactctcaaagtacataaaacaacaactgattgaaatgcaatgaaaaatacgtaagttaaaacataactggaaattggccaggcgtggtggctcacacctgtaatcccaacactttgggaggccgaggtgggcagatcatgaggtcaggagatcgagactagcctggccaacatagtgaaaccctgtctctaataaaaatacaaaaattagctgggtgtggtggtatgcatctgtagtcccagctactcagaggctgaagcaggagaatcacttgaaccccggaggcggaggttgcagtgggccaagaccacgccattgcactccagcctgggtgacagagtaagactccgtctgaaaaaaaaaacaaaaataaagaaaaaaaatatataactggaaatggaaatatttttctagaaacaattcccagaacaagtacacaaaaacacggtaaaaatatacaagatttgcacagtattaaccaagaaactacatgagatattcacagaacattccacccaacaccaacatatacaatattctcaagcccatgtggaatatttgccaagagggcccacacagtacataaaacaaatctcaattattatttaaaacaattcaagtcataaaaagcatgttctctgatcataatggcactaattataaatcactaaccaacactgaaacatccttaactgtttagaaaacaaaccaacatacttctaaataaaccataggtcaaagaagaaatcaagaaggaaattagaaagcaatctgaactgaatcaaaatggacacacaatgtatcaacttttatggaatactaactaataaagaattacctaggggaaatttacaacactaacatctatgttagcataaataacaacaaaaaaagacctcagttggctgggtgcagtggctcacgcctataatcccagcaccgggcgagcgggcggatcacaaggtcaggagatagagaccatcctggctaacacggtgaaacctcgtctctactaaaaatacaaaaaattagtcgggcatggtggcgggcgcctgtagctattcaagaggctgaggcaggagaatggcgtgaacccaggaggtggagcttgcagtgagccgagattgcgccactgcactccagcctgggcaacagagcgagactctgtctaaaaaacaaacaaacaaacaaacaaaacaaaacaaaactcagtcttcgccttaacagaaaaagaggagcaaatcaaacccaaagcaagaagaataaaaataataatcatcagaaaaaataataaaatagaaaactgaaaatcaatagagaaaaaaatcaatgaaaccaaaagccgattatttgaaagatcaatgaaattgataaacctccacccaaaggggagaaaagggaaagaaggcataaatgacccatttcaggaataaaaaagggattatcactataaatcataaagtattatgaacaaccccatgccaatcaatttgacaacttagatgaaatgaacaaattccttgaaagaagcagaccaccaaagcttgaccaagaagtagataaagcaatgaacactaccatccagtaaataatttaagctggtcgggcccttcagaaaacagtttgccagggccgggcatggtggctcacgccccagcactttgggaggctaaggcaggcagatcatctgaggtcaggcgtttgaaaccagcctggtcaacatggtgagaccctgtctctactaaaaatacaaaagttagccaggcatcatggtgggcgcttatagtctcagccgcttaggaggctgaggcaggagaatcacttgaacttgggaggtggaggttgcagtgagctgaaatcgcaccactgcactccagcctgggcaagaaagcaagactctctctccaaaaaaaaaaaaaaaaaaaaacttagatgcatgttcaacttccaagaaaaatacaaagcaccaatttttacttaagaagaaattgaaaatctgaaaaagaaaaaaaactatatttctttctcttcctttctctctctcccccacccctgctcccttctctctctttctctctcttttgttctcataaagtgattaaatcaataacccaaacacttcctataaaaacaggttgatgccaggcatggtggcttacatctgtaatcccagcactttggggggccgaggtgggcggatcacccgaggtcaggaatttgacaccagcctggccaacatggtgaaaccctgtctctactaaaaatacaaaaattagctgggcagcacacccatagttccagctgctcgagaggcggaggcaggagaattgcttgaacccaggaggtggaggttgcagtgagccaaaatgccgccacttttctccagcctgggcaacagagcaagactctatctcgaaagatggaaaagagaggagaagagaggagaaaggagaggagaaaggagaagaaaaaggagaggaaaaaggaaaggaaaggaaaggagggggaagggggaagggggaagggaaaaacaaaagaaaagaaagaagaaagaaatagctggacatgatgtgtcctgtaataggaactgaggtgaatacaccttcagtgcaaagtttgaggttcgtctgcgtaggagttaggccgtgttcattgtgtgctgtagctgtgtttgtgttgcagcttcaattcttccagtctttatttatgtcttctctttgggtttccctagcaattctttcttaaatggagactgtcttgcaggtctctcagttggaatccacaatttttactctgtagctctgctgaggaggaggtaaggtatttcagaggggacgctttctgtaatcttacgattagcactctcttccccaccgtggccagacggctcgcgttgtaacttgacaagaatttcttaatttttttttttgagacagggtcccactctgtcacccaggttggagtgcggtattgtgatctcagctcactgcaacctctacttccaaggctcaagtgatcctcccaccttagcctcccaagtaactgggattataggcagtgccaccacacctagctaatttttcatatttaggttggagtgtggtgttgtgatctcagctcactgcaacctctgcctccaaggctcaagtgatcctcccaccttagcctcccaagtaactgggattataggcagtgccaccacacctagctaatttttcatattttttgtagagatggggtttcgccatgttggccagggtggtcttgacctcctgtcttcaagtgatctgcccgcctcggcctaccaaagtgctgggattacaggtgtgagccactgagcccggccaaaattcacttttcttgatatacagttctatgagatttggaaaatgcatatggttgttcataaccacaatgtggatatagaacaggccgggtgagatggctcacacttgtaatcttggcacgttgggaggctgagacgggtggatcgcttgagcccagaagttcaagaccagcctgggcaacatagtgagaccctgtctctacaaaaatacaaaaattagctgggtgtggtggtgcacacctgtggtcccagatacttcagaggataagactgtgccactgcactcctgctctgggtgacagagtgagaccttatctcaaaaacaaaaaaaaggttgggcagggggatatagaacaattctgggccaggcacggtggtttacacctataatcccagcactttgggagtctgaggcaggaggaacacttgagcccaggagtttgacaacagcccgggcaatgtagggagacctcatctctaaagaaaaaaaaattagccaggtgtggtggtatgcacttgtggtcccagctactgtggtggatcacctcaggtgatctgcccgcctcggcctcccaaagcgctgggattacaagcgtgagccacagcgctgggccttcattggctatttcatgctgagatatccatttcttctccacatcagaagcctcctcgctgagaagggaaatttatgaccaatgtttcaaggatgcgtttaccaaatgagatgaccacttccacgagggctatttgcatacaaaaatggctgcccctgcctgacttgctcttacctgtacactctcctcttgtttcttccctcacaatcatccatggctcttttccttgctccaataaggtgattaaatctggcttagatacggaatgtcctgcttacaaagaaaagaagtgccacaaaatacggaaatcaactttgaaggtaaaatttaaaattacaattgcaataaatgaaaggtcaaagtgatactgagtaagattttagagaagagtgagggaaataaagaaaaagatcacccagggagagtcaatgtttttgtttgctggttttcaaaaaaaattttttttttttttttgcgacggagtctcgctctgtcacccaggctggagtgcaacggcgccatctcggcacaccacaacctccgcctcccaggttaaagtgattctcctgcctcagtctcctgagtagctgggattataggcgtgcaccaccatgcctggctaatttttgtatttttagtagaaatggggtttcgccatgttggccaggctggtctcgaactcctgaccttgtgatccgctcatctgggcctcccaaagcactgggattacaggcatgagccaccgtgcccagtctcaaaagaaatttaaacttatatgtcctctaactgtagaaagcaagcataaagtggttgaaaacacatactctaaagcctgggattggctgggtgcggtggctcatgccttgtaaccccagcactttgggaggccctgaggtcaggagttggagaccagcctggccaatatggtgaaaccctgtctctactaaaaatataaaaattatctgtaggtgtggtggtagtgcctctaatcccagctactaaggagggtgaggcaggagaatcactttaacccgggaggcggaggttgcagtgagctaagatcgcaccacagcactccagcctgggtgacagaagactctgtctcaaaaaaaaaaaaaaaaaagcctgggatcaattcctgactctgtcaccttccagctgtgtgtgaccttgggcaagttacttacactgctggtcagtattctcacttataaaattgggaaaacaataaagctgttgggagtattaaattacttgatatatgagtaaagtaattagaaaaatgttggtgtggaaatcacaatgctagctgttcacattacactgctgcaattattttactaagactatacaagaagagatatctatagtatattcatcccattttacatgtgattttcatggattataagcttcaaccataaatcaaatgaattctgtctcaggaaatggactactttcttctcaattttaagtaagtttcatttatccagtccaccactctatgcctatatgaacagtctctttcaataataacggcaattcagcaccctctttcaaagtaatatcactgcaaatggatcagataataaaatggagcactatagcaattctgtgcacaaaataaataagaaacctgaacgccctgacaatggttctacaatgaacaccagaaaattccaagctaaaccactggttcaacccacttactgggttaaagagacaaataaaagaggtatcagagggaggtgtgaatgtcactgaaagatagagaagatgaaagtgttgaaaggacctgccattactgactcaaagctgaaaccacctcaatagaaatagagaaaataaatttagtttcttaaaaggcagccctgaaaaccacaacagaaaaagaatgtatcctacgaaacagatgattctaaattattctaaatcattccaggttgataaacatacccaatgagactaagttgtcatagttctccatcatcacctcctggtacaaggtcttctgaaccaggctgagatattcccactcctgatgagagaagtctatggccacatccccgaatgttattgatccctgaaacagcaaacccatgtattactggggaaattccaaaatggagtggaggggccgggcactgtggctcacgcctgtaatcccagcactttgggaggccgaggcgggcagatcatgaggtcaagagatgaagaccatcatggtcaacatggtgaaaccccgtctctactaaaatacaaaaaattagctgggtgtggtggcgcatgcctgcactcccagctactcgggaggctgagataggggaatcacttaaacttgggaggcgcaggttgcagtgagccgagattgcgccactgcactccagcctgggcaatagagcgagactccgtctcaaaaaaattaaaagaaaatggagtggatggccgggcgcggtggctcacgcctgtaattccagaactttgggaggccaaggcgggcagattacctgaggtcgggagttcaagaccagcctgaccaagatggagaaaccctgtctctactaaaaaaaccacaaaattagctggcgtggtggcacatgcctgtaatcccagctactcaggaggctgaggcaggagaatcccttgagcctagaaggcagaggttgcagtgacctgagaatgctccattgcactccagcctgggcaacaagagcgaaactccatctcaaaaaaaaaaaaaaagaaaagaaaaacgaaaatggagtggaggagatgaaggagtgcattgcagcagaagagcaatataaccagcatacagaccagaaatctatgctatcagggaggggaatgaagcagaatttatacatatttttgaagaagcttgaaacacaaataaaactttctgcctgttctgggacacttcttaggtatctgacctttttgaaaatgacaaaataataatgtttttctattaaactaaatcattattatgcacataatgccctggtggtatctgcctcataacttctcaatcaatgtgtgttaactgaggaatattttgacttggaagagaatttaaacttttaatcaagagatgttttatgcaaaatatggtacagattctcaattttagaaaactaggtttcctgtgacctcgtggtgcaacaatagcgcatctgactcacgcatctgactccagaaaactaggtttccttaaaattaataatttcttcaagcatcaagtacttcattacattaaatcttaccatgagcatttttgtttgttttgacaaaggattttatcatgacattattattttatggtatttgtttttcaggactttctatccaaatccacgatttctgtgtttacaagttccaatccaatagactaattcacacaaaacatgagattttaccctacctgaagatttagatccttcaatgccaatttccaccttatctagctgaaaaattcagatgtctggaaaatttcaaagacttcccatggatggtcaaatggaactgttgtctcaatcgcaacaaatgacaaaaccaacctgaaatgcgtattatctgtactcaaagaacttgactcctttcctctgtatcactgcccaaaatagaagaatgggcacctagaggacattaatttggtcaataacaacatgaatgctagtgaatttgcagtggcccacctagcgaggatgctgggtgatgtggtacatattttactggaagaatgagaactggagattaggttaactgagcaccgtctcacgaaggtaacttcaggaaaaatgatgagaagacatacatgacctaaaaaatcacacacaaacctccacatggcgagaaatatcaacttacataggacatggtttgagactggcaagagttgatcagtccttggcgtttctctaccagaagagcaaagtcaaaagaaccaagacctgaaagaagagaagaccttgagaccagctgtgctttagtggtccccataggactcaaggtaatagtactgttttcctcttccattccaagttacaaactacctcctctcacatacaatttgggaagattaagattctggataaacccatttcctcccccactacccaagggcctcacctacacagagtcatacattagaaacatactgtcatggaaaccagacccagataattcagtaggaaattttctggccaatgtacgatgttggtgaggcagatggggacctcagattaggcagccctgtcctgctttgagcagaactacctctttccattccctcctttaagggtaaaaacagggaacatcatccataccagaacctctttttagtcttgaaactggggaaattggtcaagatattggagacagatggcgagtgttcagcattctaagtctagcaaagcttcctagttaaatatataacagactatcactgtcctagaatacaaactagtcattaaatgtgaaattgagaaaaattcaaggacatgaaaaatatcagaaacaatgtcaacataaagatcagactgaccaatacatttatttttgtaaaatatataaatacatatccatcaatacagagagaaaggctggcagacagataatcataaaataggcaaggtggcatgcacctgtagtcccagctacccaggaggctgaggcgagaggatcacttgagcccaggagttcaaggttgcagtgagccatgattgtgctactgaactccagcctgggtgacagagcaagactctgtctccaagaaacaaaaaagtgcttatagtcatagtgcttatatctcactatgtattccattttggctgaatacatgaaacaactaaataaaactaaaggaaaagtaaataaacctttgcttagcaacttcccataatcagagtttgataaatagcattccctatacttttgtgtggctcttgattttttcattattaatacttccttcacgattattgtaagcacggacatattaacttgaaacatgtatgtgtttccaatttgttaaggtgggaatttcaacaaaattattttttctctaaatttaaaatcatcttactgaatggcttatcttctgtgggttcctttgggtccccaaacctaaactcacttcatcaccggttctcagatatgttagaattgtgtctccaacaacatggggaactgtccctgagaaatctcctctgtgaatggatgatggtctcaatacagctttatttcaggtcttcttaacagaagggtttatttcgttcctaaatctggcaggtaggtcaggatatcctctagatagctgctgaatttcctcatgcaattaattttgctttctatctagtatcattacagtgaaaactacaaggtttaaaagatgtagtataaaacctgtttatcaccatacatagcccatagactcagtgtaatttgttcatagcctgactattgctatactcagactgatgtctctgttacgtgacatcaccaagtagttcacctaaatctctccaaacagactctatcacacactgccttaaacttcctcctattcagatttgactttccttcatagactgtaaaagtatttcagaggaagcaactcatcttttcagtgattgtcccatttcaaatactgcaattttcaggtgtggcgtagtagaagcacttaataaaagtctgattttttttttttttttgaggcaaagttttactcttttgcccaggctggagtgcagtggcatgatcttggctcactgcaaactccgccttctggtttcaagtggttctcctgcctcagcctcccaagtagctagctgggattacaggcacctgccaccatacccacctaatttttgtatttttagtagagatggggttatcaccatgttggccaggctggtctcaaactcttgacctcgtgatctgccagcctcagcctcccacagtgctgggattacaggtgtgagccaccacgcccggcccaaaagtcttttttaccacaaaattcacaggtacacttgtaagaatttttaaaaaggaaataacgatagaagtacacaaccaatacgtacaatacattcatcaaagataatttttgattatcgaaattaaaaacacaaatattaaaagcacaatagggagtaggttaaacatattattctccggactatggtaacatcctatgccatgattactaagattgatcttaaatcatataatcaaaggaaaatagtaccaaggatgagttagtaaataagacaggtttaaaaacgtatgcacccagtcgggcgcagtggctcatgcctgtaatcccagcactttgggaggccgaggtgggcggatcacgaggtcaggagatccagaccatcctggctaacacagtgaaaccccgtctctactaaaaatacaaaaaaaattagccaggcgtggtggcgggcgcctgtagtcccagccacttgggaggctgaggcaggagaatggcgtgaacccaggaggcggagcttgcagtgagccaagatcgcgccactgcactccagagcaagactccgtctcaaaacaacaacaacaacaacaacaacaacaacagcagcagcagcagcagcagcagcaacaacaaacatactcaccctgtctccagtaaaaataattttaaaaaaaattagctgggcatggtggcgggtgcctgtaatcccagctacttgggaggctgaggcaccagattcgcttgaaccaggagaccgaggttgcagtgagccaagatcatgccactgcactccagcctggatggcagagtgagaccccatctcaaaaaaaaaaaaaaaaaaaaagtatgcaaaaattagttacgtggtatcctgctgaaattaagaagacaggctgtcttctcactctcaaaagtgatactgagttttgccttatgagagatgctaacatatgaatgcctgtttccccatcagcaaataagggataggaatatatcctacttaacgagacagttctgaagattaatcaagatgatctatagaaacacgaaaaaagtaaaatatgatagctactgtaataacattatcatcaaatgttaaaaaataccacatgctcattaatccgttattataaaaggaacttaattctgttgcttcctgtttttctttctttctttctttttttgaaatggagtcgcgttctgtcgcccaggctggagtgcagtggcacaatcttggctcactgcaacctccacctcccaggttcaagctattctcctgcctcagctctccgagtagctggaactacaggcgtgtgccaccatgcccggctaattttttgtacttttagaagagatgggctttcactatgttgaccaggctggtctagaactcctgacttagtgatctgcccacctcagcctcccaaagtgctgggattacaggcatgagccactgcacccagccactttctgtttcttaaagtttgtgcttcatgggctttctcctactcataattccgaatttacaaatttcatggcccacctttaagaaaatacaagtcttctttaaaaaaaaaaattaggttttttttggctgggtgtggtggctcacgcctgtaatcccagcactacaggaggctgaggcgggcggatcatctgagttcaagaccagcctgaccaacatggtaaaaccccatctctactaaaaatacaaaattagctgggcatggtgatgcatgcctgtaatcccagctactcaggaggctgaggcatgagaattgctgaacccaggaggtggaggttgcagtgagctgagatcatgccattgcactccagcctgggccacagaatgaaactccatctaaaaaaaaaaaaaaagatgatcagataagtaaggagaaaatgcccctttccttactccccagcaggtacagaaaacaaggaagataccactcagcctcacatacattcaaagaactggatctaataaagtgctaggtcaagaatattaaggagagtgaatcttattttcctgccaaatacaaacatttatgtgagtatttgtaaatatcacaatacctatttgttattattactgaactatctttggaaatattaccatacttgcaagacatctggaaatcatagattaccatgcttttctctgcagtaactttgcatttctaaactactaattctgagaggatgtcttcatcatttgtgccctgttaagttttaaatcgcatttttaatacctaaaaggtataaaaacttggattgtttttcacctctgaaggaggtccctggtagctccctctcctcttaaaatgcagagatatatgaaagcccatgtcaaaagacctagttgcaacacattgacttacagatctaatgggctttgtgattcatgaaaggggtagcctccattgtacaaaatagcgtaagagctcctactgagcaatggagaaacagtggattttgtaaggtggaaacaaataagagaactatagaaaaaaaaattgattggtgactatcaggctacttcagtttacttttttctggaaggttaagcggaggtcatttccttattatgctgactcaggtagactggagtctcctgttttcaggaaaaactgatctgtttggaactctacctgctcccttaaagtttcagttttgtaatgtggcttttagcatgagtgacttcattttggtttagtctggtctgttggagcctagtgcagaagctcagtccaaagtaatggtgtctcatcatactggttttatatccatggttgggttagattcctttttctaactaaaagtaggagtctgtctatttcattaattctcttctgtaaagacaaaaccacacacaagtgctcacacatgaaaactgaaaacatatacacccaaatttgtaaagtgattctctctgggcagggaggtttgggttattctaaatttcttctttgaaactatcttagggagtgaaatttttgtgacgaaactgccttaattccatcatcataaatataacttcaagatatttcaaagtagtaataaactatttctaaaagtatccttatggggagagggtacatgtgtcattaaaagaaatctaaatattaggcctagaatgaaaaatcagcgtgactaaaacatgtaactctttgtcttcttgaacagcctttagctgtgtttcttctacataactagaaacaattcactataaagattctttccttagtggacagggaaatggcttctgcacatctaatgggaacaggtacacaaaataggtccaataatttggggcacacattatatgctcagtaaatgtagccacaaccctttcattcctctctgaaaaaccaattaaataatcattttggatacaatccttgcaaaagtttttgcaaaattccctttgtttaattttaattttaaattttatttttttgagacggagtctcgcgctgtcgcccaggctggcgtgcagtggctcgatctcggctcactgcaaggtccgcctcccaggttcacaccattctcctgcctcagtctcccgactagctgggactacaggcgcccaccaccacgcccggctaattttttgtatttttagtagagacggggtttcaccatgttagccaggatggtctcaatctcctgacctcatgatctgcccgcctcggcctcccaaagtgctgggattacaggcggaagccactgtgccaggcccaaaattccatttttaaaaaatgagctgcggctgggcgtggtggctcacgcctgtaatcccaacactttgggaggccaaggtgggtggatcacctgaggttgggagttcaagaccagcctgacccacatggagaaaccccgtctctactaaaaatacaaaaaaaaaaaaaaaatagccaggcatggtggcccatgcttgtaatctcagctactcaggtggctgaggcaggagaatcgcttgaacccgggaggcggaggttgcagtgagcagagatcgcaccattgcactccagcctgggcaacaagagcggaactcagtctcaaaaaaaaaaaaaaaaaaaaaaaagaaagaaaaagagttgcatatatagtttgagaactgtgatccaccactgtaactctaaatagtgttaaacattagatcacagctatttatcctgtgacagattctttacaaacataaatcttattatttgtataatatccaatcccttggacgctgtataattttcttaaccattcccataatctcgttcattagttttctgcaaaaccattcaaaggtataaaactctttgattccagatctaaaacctgagtctaaataatttggattatggacatcctagaaaaatgcaaattaacaaacatgtacaggaattctttatagaatttcagggggtttgtgatgtcccttatgcccataagggcattggtctacagacagtacaccaatgaccgagaattcctattttggaaaacttaaattctggctcacttccttcacatcacggctaagttcatattcttgttgcttttgatctacagaaatccaaaacggaatatccaaaattgcctcataatacttagcgcttatgtttcccccctccaaggctgcaggcgcgtaatttcatacacacgaccagaaggaagtatgttggatggaacctgcaatcatccttcactgcaggttcttggggtcagaattcaaggccgtgtttgttaaacatgtaaatgaaactccaagaaccgggaggtgggggcggagtaacaacccttttcaggagggaatcctacactcgaaactgacaaaccctgccagaccaaattttagtcaggctactacaccttcagctaggcccatctgtacacttcactgtaaaatctggctatagcaaagaactattctaagtcagtttagcaagaccctttcgcctccgtatcttcatcctccaccgtcccccaggtctctctctccagaaataatcctgttaggtgcgtttagtcagaatcttccttaacccagacatttcctcttagtaatttctcatccagtgatccctaaccttcttggctataaattcccacttgttcatgctgaattcggagttgagcccaatgtctgttacccactgcaaaatctcacagccgggatcccaatacctaccaccatggtcctgaataaagggttctttgcatgctttaacaagtgtcactgaatacttttttatttaacagaatctatcatacctttcttaagggcaattactcttctaagcttctcatcctatctgtttcttctcactggaaatcttcatctaagactcagtatctgatttcccattgggaccatttctctgttgtagtcgtactaggctgaggaaggcacaggaagcagcagggaacctggagccaagggtcaatagaccccacagagcccagcgaagcacgctttacaaaggacacacacggcatgtacaggtcacacaaggtcgactacgcacccctcacagtcccgcaactgcacccacgtcacacaggcaagccggtcctgtcgccgctgcgcggtctctcacgctccccgcctgtctcctagagacgggcccctcctccgcagctccagcaccctagggcctgaggaggcgggagactcgcccggcccgcctgggggcctccgcgctctgagcgcctcctgcagccccactctcaccgccacgcagggtaccacgcgggcggcgggctggggctgcagaggctcccgcagtgacctgcgccgccttcttcaggtggaaccaaaaggtcccggaaccggagccaggggtccaagttttctccgttgcctttgtaatatgtagtccaagccagaacagtcaggaccgcaggtaccggtgagaaatggagtccagaatcctaaaaacctacgagaaatacggcagcgaccacttggaccgcgcctcccacccaccgctcgagccccggagacttctgggagtggccgccttgcctcgagtgcgcatgcgcagatcggccactactgggcccctggcctgaggcttagggtggagttagtgcgttcttagggccagtaggaggcgagtctgagtagaaactgatccaggtagcctcggaagggatcacctgctggatgggtgtgagctcctcagggtggggcgccgaaaccctcatggctcctgaggtagagccggcctccttggtaacacatgggactgggacttttaataccacccgacaggcccagcttgtctcgtcaagcgctaagtaaatggactcacgtcctatatgagggtttgaagttccatcacattcttcaatacatgacattatgttcttcatctttggacacgaatatatttgactaaaaatttgactaaaaaatcatctgaagaaataactgctaaatagttttattatttttgttctggaataggcttcttgaagataaaataagaaatttaaaaaatttttttgatccttcatgtaatactttgtaaatcttcatagttatttagaagcatccaaaatttccaaatggtaaaaaacgaataagaaaaatttttaggtaagtaaatttgggggaaatatttacaacagctaaaacggacaaatatttaatagtccgaatttcctgtttctttggcttaataaaatattgatgaatacaggctgggcacggtggctcacgcctttaatcccagcattttcggaggccaaggcaggaggatcagttgaggccagaagttcaaaaccagcctaagaaacatagtgagacacccctctcctcctcccaaactctaccaaaaatgaaagttagcctggtgtggtggcacacgcctgtgggcccagctattccaaagacaaaggtaggaggatcagttgagcccggaagttcaggcttcagtgaggtatgatggtgtcaccgcactctggcctgagcaacagagcaagaccttgtctcaaaaaataaataagtaaaattaatttaaaaataaaaaatatttgtctataccctaagaggaaaaggaacaaaactaaaaaatcaccattcaaaaatacaaatagtcaaggaaaaaaaactattaaagttacaatttaagaacttattgatcactttttcttctcttaattagttcttggatttgttgctcctgaatctcctgaataatctctcagaaataccacacatagatcaatggattaaattgactccacatattattttctttttcttttttctctttttgagacggagttttgctctagttgcccaggctggagtgcaatggcacgatcttggctcactgcaacctccacctcccaggttcaagcgattttcctgcctcagcctcctgagtagctggaattacaggcatgcatcaccatgcccagctaattttgtatttttagtagagacagggttttaccatgttggtcaggctggtctcgaactcccaacctcagatgatctgcccgccttggcctcccaaagtgctgggattataggcatgagctactgcgcccggctccacatactattttcaacaaggataccaaggcattttaaggaagggaagagtagtctttgttgaaaagactggaattagagatgcacatagaaaggaatgaattgagttccctgcctctcaccatatacaaaatcaactcaaaatggatcaaacacctaggtgtaagacttaaaacagtagaacatttagaaggaaatgtaggcataaatcttctggactttatagtcagcaattgtttcttaaccgtgacatcagaatcacaagcaacaacatcaaaaaaggaaattggacataaattgtaaaacattgtgcttcaaaacccaccaagaatgtgagaagctacccaaagagtgagaaaaattgtttgtaaattatgtatccaataagggatttgtatctagaatatataaagaagtcttgcaactcaataataaaaagcccaacaaaaatgggcaaagtaactgaataagcatttctcaaaaaaaaaaaaaaagtatacacatggctactaaatacttgaaaacatgttctatattaatcattaagaatatgcaaatcagccaggagcagtggctcatgcctgtaatctcagcactttgggaggtcgaggcaggaggattgcttgagcctaggagttcgaaaccagcctgggaaacaaagaaaaagactatgtaaatcaaaaccccaaaaccccaatgagatatactacttaggatgactaaaatcaaataaatatacaataacaaattttggataggatttggataaatagaaccctatatacattgatggtgtcactggaaaatggtagaactactgtataaacagtctggcagttcctcagaagaatgtagagttaccatacgatgtagcaattttagtcctaggtatattctcaagacaaaaccatatgttctcacaaagcttgtacacagatatttatagcagcatgattcatgatagccaaaactggaaagaaaacccaattgttcttcattttataagtagataagtaaaatgtggcatatctacacaatggactattatttggtaatataaggaaatgaagatctgatacaagctacaacatagatcaaccttgaacactatgctaagtgaatgaagctggtacaaaagaccacatatttatgattccttctatgtgaaatttcttctcatataaaatttccaatgtgggctaatttatagagactgaaagtaaattgtttcctaaattgaacggtggcagaaggaattgggatggtggctaaaggctttcatgctggcgtgatgaaaatgttataaaactgtgttgaaggtttcacaactttgtgactacattaaaaactactggattttacactttaaatgagtgaattggatggaatgtgaattatatacaaagttgttaccaaaagaaataaaaaagaaatacagagttttcaacaagtaaaaactgagagcatttgttgttagcagatcttctttataagaaatgttaaagaaaattcttgagaaagaataggacagaatcagaaatttgtatctaaacaagaaatgaagagtcagaattaaagttaatggaagtaaaaccatttttttcctcatatttagtttctctgaaagatagtaataatgttattattattattcttaaaattttttgagatacagtcttgctttgtcacccaggctggagtgcagtggcacgatctcagcttactgcaacctccgcctcccagattcaagcaattctcctgcctcagtctcccaagtagctgggattacaggcacgcgccaccaggcccggctaattttgtatttttagtagagacagggtttcaccatgttgatcaggctggtcttgaactcctgacttcaagtgatccaccaaccttggcttcccaaagtgttgagattacaggtgtgggccactgcgcccagactatcttattgttttttaaagacaggatcttgctccgttgcccaggcaggagtgcagtggtgcaatcacagctcacagcagcctcaactggtgcaatcacagcttatagcagcctcgacctcccaggctaaagaaatcctcctacctcagccttctgagtagctgggattataggtgtgcaccaccacacctggctaatttttaaatttttttgcagagacagggcctcactatgttgtccaggttggtctcaaactctggggctcaagtgatcctcccacctgagcctctcaaagtgttgagattacaggtgtgagccactacgcccagctcaatcatcttttaagcaatttaaataataagatatatttacccacatattagtcatttcctatgtaggtccaaatttccatctgatatcactttccatttgtctgaagaaccttaacatttcttagagtgtaggaaagcatcaatcctctcatcttttagatgtctaaaaaaatcagacatccacaaattttcaccttcgtacaaaagtattttcacattgtatagaattcaaggtaacatttttcatttctgcgctatacaagaattttgctcaactgtcttctaggttatgttggtttcaacaagaaatacttttattcttgcatttgttcctctctatgtagtctcctttctctgctgacttactctttatcactattttaaagcaattagattatgatcagtctttgtttagatttctacatttcttgtgattagaattcactgagttgcttcaatttgtaagtctacagttttcaccaattgggaaaatttttaagcttactaatccttttcctgcaatatctaatcatttctccagagtattttacatctcagacattgtagttttcatttgtggatgtttaatgtggtttaaaaaaacatctcccatgattctcctaaaagtgcttatatttcagccaggtgcagtggcttacacatgtaatcccagcagtttgagaggctaaagcaagaccctgtctctactagaaaatacaaaaaattagctgggcatggtggtgcatgcctgcagtcccagctaccagggaggctgaggtgggaagatcaactgagctcaagaggtcgaggctgcagtgagccatgactgggccactgcactccagtctgggccaaagagtgataccctgtctttaaaaaaaaaaagaaaaaaaaagtgcttatattttggtctacctttgtcaacatatgaaatatcattataattattctgataacctgtcaattctaatacgtgagacaattttgattaatcaattttgctcctcgttatgtgtcatgttttcctggtcctttgcatgtcttgtaacctttttttttttctttttttgagacagagtctcgatcttgttgcccaggctggattgtaatggtgtgatctctgctcactgcaacttccacctccccgggttcaagtgattctcctgcctcagcctcccgagtagctgggattacaggcatgcaccaccaggcccgactaattttttgtatttttagtagaaacgggttttcttcgttttggtcaggctggtctggaactcccaacctcagatgatctgcccacctcagcctcccaaagtgctgggattacaggcgtgagccactgcacccacccgtcttgtaacttttgattggatgctaaacattgaaatgttaccttgccaggtattctggtatatttttcaatatttttgagctttgttttgaaatatagttcacgtaacttgaaaacagtttgatctttttcatgggttctttttcagctttgataaggcaggaccagagcaagactaattagtccaaagctgatttttcctctctcttaagacagtatacttctgagtatccgaggtcttgtgaattatgagggtttttccactttggctattggtaacacctgctattcctggacttgtttgagctatgaggattattccctctattcatttcaagtgggtttttccacagcttcaggtgttttcacatatagctaactggtcagtactttcagctgaagattcaaagggaactccctggcagcgctccagagatctcttcatggaggttgttcctgtctagtactttgttccacataccctggcttctgcaaatcctcaagtttgtgtctcaattcgggaagaacactgggctctgcttctgttaactctccctgagcaatggactgaaaatactccagatgttaagttgggagaaataatagagctcaccttggtggtttctgcaaatggggattgtggtctgcttgttgttcagtgtctgaaaactgtcattctatatatttttaaaaattattgagatgggagggtacatcctaccctgttattatatcttaaaagtaagcaaaattttaatttttttttttttgagatagggtcttgctttgtagtccaggctaacgtgcagtggtgccctcatggcagcctcaaactcctggctcaagcgatcctcttgcctcagcttcccgagtaactgggactacaggtgcatgccaccatgcctggcaatttttttttttactttttgtagagatgagtcttgttgttttgttctccagccttgtctcaaactcctgggctcaaaggatcctcccaccttggcttcccaaaatgtggggattacaggagtgagccactgtgttcagcctaaaattatatcttgctttatctcaataatgcttatttaagaagaaaaagctaaaagaaaaacacttaatgatctcttccataagatcaccaagaccaaggccctgatcaagaaacatgtggttgataatccacatggtaaagctttctttttttgtgattacgtctttgcatgcgtgtgtctcagtgaagaccatggaaactagaggagtatctaaaaattgctcaattaccattaactgtagagagaaaaataggaaggaatagaacataagtgcataaaaatagtaagaatagccaggcacagtggctcacgcctgtaaccccagcactttgggaggccaaggcgggtggatcacaaggccaggagttcaagaccagcctggccaagatggtgaaaccctgtctctactaaaaatacaaaaaattagccaggtgtggtggcggacacctgtaatccagctatttgggaggctgaggcagagaattgcttgaacccgggaggcggaggttgcagtgagccaagatcgcaccactgcactccagcctgggcaacagagtgagactccgtctcaaaaaaataaaatataaatcaatattacaacttttttgcatattgtttccactttaaaatatttaagatgctttcagaccgggcgtggtggctcaagcctgtaatcccagcactttgggaggccaaggcgggcggatcacgaggtcaggagattgagaccatcctggctaacatggtgaaaccccgtctctactaaaaataaaaaaattagccgggcaaggtgatgggcacctgtaatcccagctactcgggaggctgaggcaggagaatggtgtgaacctgggagatggagcttgcagtgagccgagatcatgccactgcattccagcctgggccacagagcgagactccgtctcaaagaaaaaaaaaagatgctttcaagtatctgctaaaaattaacgacttttctttgcttttttagagacaggttctcactctattgcccaggatagagtgcagtagtgccatcatagctcactgcaatctcaaactcctaggatcaagcaatcctcctgccttggcctccagagtagctggtactacaggcatgcaccagtatgcctaattaaaaaaaatttttttttgtagacacagggtctcactatgttgccagggctgttcttgaactcctgacttcaagtaatcctccctcttcggcctcccaaagtgctggaattaaaggcgtgagccaccacacccagcctatgatttttaatatatacctaacattgctcaattaattttgcaaatgataattaagtgcttggcaatatttcattggttaaatccataagattattttttatctgaatagaatataagtattcagaatattcctaatagaaagttttctaataatggaaacattgtatacagtagtctccctcttatctgcaggggttatgttccaagacccccaggggaagcctgaaaccaaggatggcaccaaaccatcctatttttttactaaacatatgtacttatgataaagtttaatttataaattaggcacagcaagagattaacaacaaggaaacattagataaagaggggactactgtatctgtaaagtccaatacacatggctattgaacacttaactgtgactagtcctactggtgaactcaattttatgccttattaaatttaaattaatttaaaatggccacgtgtagctggtggctactgtatctacctgacagtgcagatctagaggaatgtcaattgcttaatatttaatgcaatcaatgctaattatgtgacaaattataattttaacatgaggcaataaaataaaactattagtggatatttactcaccctgcattaaaatttttcacacattaaagaatctgtcattctcatgagggctgctggtaagtatccaaacacgtctaagcagcaatgcattttatatatatatttttttgagatgaagtttcgttcttgttgcccaggctggagtgcaatggccccatcttggctcactgcaacctctgtctcctggattcaagcaattctcctgcctcagcctcccgagtagctgggattacaggcatgcgtcaccccacctcactaattttgtatttttttttttttagtagagatggggtttctccatgttggtcaggctggtctcaaactcctgacctcaggtgatccacctgccttggcctcccaaagtgctgggattacaggcgtgagccaccatgcggggcccgcatcttatattcttgctaaagagttctgaactcctagcattgtattgccaagaacacataatgcttgattttcattgaggggttcatgtggggatgcgtcttttatgtggaacccagtggtaataccacaatgtgcagtgctcacaggcgttgtgcctcgggcaggtacgcagctcagttaatctgttgctttcatagaaagtagaaattcaaatagagtatcaggtgattttggaagtgtttaacaatccagtattaaaactgtaagaaggaaaacaaaataaagaaaaaacaggaccatatgggtttaaagccaaattttatctaacctttaataaacaaataatggcaataacaaaaatttaaaaaattcttaattttgaatgttaatatatgaatgctaataatattaatatcaattttgaatatttggacaaaaatcccaaacaaaatattcataagataaattaagcagcttatcaaaacaataatataccacagctaagcatattatatttcagaaatggtttaaaacaagaaatcagaatgaattataacattaaaatagcagaggagaatgatatatgaacaaagcaaaagaagtgataggatttgaaaaaatataagaagttagccctaattatagagcatacttgcatacaacaaagtaaatattagttgaatggtaaaatattgtactgatttccattaaactgtttaaacaactaagacactggctattaccccaatacttgacataatcgtatttattttaataaaagtaaagaaataataatgattttaaaagaaaattcatttccattcatagataatctgactgaatacacagaaatctcacatactattaaaaatataaatagattaccagtttatggttagagtgataatggcaacatccaaatataatatgatagtatgtgggaaaactatcagtatcagaaaaatcatgaatgcactttaaacagctactctccaggaaaaggatattatatataaaataacagaagaatcaagatctagagtatgtgtgtgtattcataaatcagcaggttgagaaaatgagcaaaagaaacaaacaggaaagtcacagtaaataacatgattggctaataaatacatataaaaaatacttaatgggttagttaaaaaaataattatatttttagatggacaagtggagttactggatacttttatttccagctgaccagactagaaattacaagagtagaagagcatttggaaaagatccaagtatagatacatcagctatgactgcaattatagagttttgttatttacagactcctctgaaacaatattctaagtagagttttaaaaaattatctataacctaaatactgatcaggatgagagtttaaaaacatttaggccaggcgtgggggcgcacacctgtaatcccaacactttgggaggccgaggcaggtggatcacctgaggtcgagagttcgagaccagcctgaccaacatggagaaaccctgtctctactaaaagtataaaaaaaattaggcaggcgtggtgatgcgtgcctgtaatcccagctactcaggaggctgaggcaggagaatcgcttgaacctgggaggcagaggttgcagtgagtcaagatcggaccattgcactccagcctgggcaacaagagcaaaactccgtctcaaaaacaacaacaacaacaaaaaaaacccaaaaaacaaaacaaaacaaaaaaacatttaggtttttcattttgtagaaaagtaacagtagtacgagtacagaaaaaggtggttacttgcctatcatcatgtgagctgactgcattctcccggggattaatcacatgacaaaatgctgaaattccagtttgagggtcattcctttaggtcttggcagcatttcagcttatggtttcatgtcccgattttttttttttttttttttttgagacagagtctcactctgtcacccaggctggaatgcagtggcacaatctcggctcactgcagcctatgctccgggttcaagtgattctcctgcctcaggctccagagcagctgggattacaggcatgcgccaccacacctggctcatttttgtatttttagtagagatggggtttcaccatgttggccaggctggtcttcaactcctgacctcaagtgatccgaccacctcggccttacccaaagtgctgggattacaggcatgagccaccacactcagacttaagtgttagtaggtaatattaatagaaatggaagttccgaggtaattcttagatacactgggttatggaaaggcaaacaaactttctacaccacagtgcacgtcaatcttgtgagaggttaatcatgtggtttttgtttgttccaagagcaggagattgcttcattggcttgtctaagaacataaaccatttttcaattatcaagtacagtggtcatctaacctatagcaaaatcattctgcattgtgttttatttcattatcaaaacttaaaattgcataggggaaatgatgttaatatttaaaggcgaattatttcctttgtggacaaaagggatatgagcatgtagatcacaacgaatgatcacactgacactacagacacaatgaatgatcacgctgacactaaagacacaacaaatgatcacgctgacactacagacacaatgatgacgctgacactacagacacaatgaatgatcacgctgacactacagacacaacgaatgatcacgctgacactacagacacaacgaatgatcacgctgacactaaagacacaacaaatgatcacgctgacactacagacacaatgttcacgctgacactacagacacaacgaatgatcacgctgacactacagacacaacgaatgatcacgctgacactacagaactttggctgacaatgcataatgcgtgatgctccttagtttggaaaagtaatttttatagggctggaagtgagtttaggtagttatcaactgcaatcctgatttccaaaaggtttttaaaaaggtagtttttagaattgatggtatcgtgcacataattcatcccatttataaaactgtatataaagcttagaaaaattacaaggataaacacagatcaacattccttttctttcatttgtctagaatatattgaaccagaagaatgaattgactctgccagaaaaatgactattgcacaattattttaaaagaatcttagagtttgctgatatcatactcagaaattttccatttaccctaatgagtgaaactcatcttgttttcaatcatgttttaaaaattccgatttcctacaatatctatgtcattttgaaaaactatattctttcacaaatataattccttctcaaaatacattagagattgctaaatattttggtataaacatcaaaaattaactctttcttttgagactggttctcgctctattgcccaggctggagtgcaatggcatgatctcggctcactgcaatctctgcctcccaggttcatgcgattctcctgtctcagcctcccaagtagctaggattacaggcgcatgccaccatgcccagctaatttttgtatttgtagtagagatgaggtttcatcatgctggccaggctggtctcgaactcctgacctcaaatgatccacctgcctcggcgtcccaaagtgctgggattacaggcgtgagccactgtgcccggcaaaaattaacttttaatttaaaacattttcttcatatctcttttaaaatttttcttgattatatctagagatttagctcatgttccacaaaatgggagggggtaagatttgaataaaaactagttttatttcctaatcattaatctctttatctagttttattaattttttcttaatattggtatatttgttttcctttcttctagcctcatatattaacattgtttctatccacagatttatagtctaacctttaacaggcagttcatatgtgctacacagagagatgaatacaatgacatctttttgtttcaatccttgtttcctgaattaaagggattatgttttcaaattaacggatcaatgtagcacccatcaaattactaatgcaaaatggaattgttcaatggagagctgacagttgcctctttaagcaagctttacagtgtagcataaataatcatgtaaaaacctgatatgctttcagaagtctgcagcatcattcatgagatgttcttgacaaaaatctcaacctaatgaattttctagacataactgccaatttatgggaaaacaagggacagagcaacaagttaaatcatactgtgaagcagaaatcaagaatgtgggacattctttgggtacttaaaaaagaaaaattcaggctgggtgtggtggctcacgcctgtaatcccagcactttggtaggccaaggcgggtggatcacaaggtcaagagatccagaccatcctggccaacatgatgaaatcccgtctctactaaaaatgcaaaaattagctgggtgtggtggcatgcgcctgtagtcccagctacttgggaggctgaggcagaattgcttgaacccgggaggcagaggttgcagtaagccaagatcgcaccactgcactccagcctggtgacagagtgagactctgtctcaaaaaaaaagaaaaaaaaaaggaaaaattcaaaagcatgaaaaagtggggatattatcctagagaaaaggaataaattaaaaaaaaatcccaaatgcaatgaattaaccaagagtggatactgattagaaaataagtcgttataaaaaatctttgggcacatatttgaagacactatataaattattacatttttccagtatgattatagtatcacagttatccaggaaatttgcatatatttaaaggcaaagggccatggtatctacaacttactctcaaatgatacagaaataacccatacataagcggataaaaagagctgaaataagataaagcaaataacatgaatgtaaacatatatggtgggttactaaacaattctttcattttttctgtatgttaaattaaaatgtacatttcaaatttagggaaaacctccaagacaacaatttacttcttgatagcccattattaattcctacttaatcttaaattgtgaacagaaaatatgaactgttggctattatcaaaatcttggccaggcacagtggctcacacctataatcccagcaatttgggaagccaaggcaggaggattgcttgaggccaggggtttgagaccagcctaggcaacatagtgagaccccatctccacaaaaaatgaaaaaagcaaaagcaaaacaaaacaagatatgcaaaatcttttttttttttttttttgagatggagtcttgctctgtcactcaaactggagtgtagcggtgtgatctcggcccactgcaacctccgcctcctgggttcaagtgattctcgtgtctcagccctccgagtagctgggattacaggtgtgtgccaccatgcccagctaatttttgtacttttagtagagatggggttttgccatgtgcccaggatgttcttgaactcctgatctcaggcgatctgccagccttggcttcctaaactgctgggattagaggtgtgagccactgcacctggtcaaaatctttagacatgctaaaatcatattcttaatttccaaaattatataaaatttaataatagatgagtggctttcagaagctgttctaaattaattatgctattagaatctttcataaaaattaattatcagcaacacaaataatgacgatatctataataggtcatatttatttatttatttattttaagatggagtctcgctctgtcacccaggctggagtgcagtggcatgatcccgcctcccaggttcaagtgattctcctgcctcggcctttctgagtagctgggactacaggtgcgtgtcaccacgcccggctaattttttgtattttttgtagagatggggtttcaccatgttagccaggatggtctcgatctcctgacatgtgatccaccctcctcagcctcccaaactgctgagattacaggcgtaagccactgcgcccggccaatagctcatatttattgagcataacgctatatgccaaacagtcttcccaggttttgacaagtataatttcggccacatccgcataataggactcttatgtaccttttttctttttagatggggcctaaaaaagccaggctggtgtgcagtggctattcacaggcaccatcatagagcactgcaggcttacactcttgcctcaagcgatcctcccgcctcagtctcccgagtagctgggactacaggtgtgcgccaccatgcctgggtttcatgtaggctcttgattatactttgcaaataattcccatagatgataaatatcttggccaatgacacacagggagttatgtggcagtgatgacaggtaaggcatgtgccatggctaaaagcactattgcatatgtgacattaacaagttagtttattagtactaatttttgagacttcaacaatgattgagtggtgtcaggtgtggcgatttaaaaataaaaatatgtctgcaaatgttttgacatttctctctttaaaaagtgaaagtgggctgggcacagtggttcacgcctataatctcagcactttgggaacactgtgggaagactgcttgagcttaggagtttgagacaagcctgggcaagttggtgagacccccatctctacaaaaaatttaaaaattagctgggcatggtgacgcacacctgtagtcccagctactcgggaagctgaagcaggaggatcactgaagcccaggaggttgaggctgaagttagccatatgcactccactggacgacagtgaaagatcctgccttcaaaaaaaaaaggtgaaacttaattcctctcttactgaatgtaggccagacttagtgattttctgggaacaaacagaacgtggcagaactaacttccaaagagagattataaaaaggatcacatctgtcacgtcacaagcacactcaagcagcttatggacaaggccccttgggagaagaaacgacttgccagtataaacttatcagccacagaactaagccatttgaaagcatatcctacagctatagtcaagcctttagataagcacaacctcttgagacacttggagctagaactgcctagcttagctgctcccaaatttctgactcacagaaactgtgagaaaaatacacatttattggcattttaagccactaattcttcaggttctttggaatgtggcatgagataacagattttggtacctagacaagggatgctattgaaacaaaaagctacaaatgtcagaggggcattgggaccacaaactgggtggaaattggaagtgcctggaaaatattattagcagaaacctggatatttttgaggagctcctagtgagggcttaaagaaaactgaaaaatgttactggagactagggggaagggattcttgttatgcaacagcagaaagcaacatggctgcacgtggttactgtgaaaagtacaaaataatacctacagaactgtgtaactggcccaggctcgtgctataatcccagcactttgggaggtcaaggtaggaggatcaagagtttgagaccagctcaggcaacatagggagacttcatctctaccaaaaaaaaaaaaaaaaaaagaattagctagatgtagttgtgcatacacctgtagtcctagctactcctgaggctgagatgggcggatcacttgagcccgggagttcaaggttgtagtgagctatgatcacaccactgcactccaacttgggtggcaaagcaagattgtgtctttaagaaacaaaaacaaacaaacaacagcaacaaaaaaagtgggtaatttagcttaggaaactcccaagcagaatgttgaaggtgtcttgcttcttgttgcttaagtgctagaagtgagataagctagaaaaagactgttaaacagaagtgaaccaggacttgcttttggaaactcccagcctctccagaaagcaaatgatgctaaacttcagaaatagtctctggacaaagataaaatccagagtgctgttagggaaacatagtatgtaggtaaccttagggtatgtgttcattttgatcctctgaaaagcaaaaagcaagatcagatcagaaggaaggagggggctatgaatgaaaaagaggtccaggaaaggcagtgaaagccttcaggccatggtacaagatggatgactctgaaggagagggatgaagcaagattggtagaaaaactatgaaaacgcggggcagtatgaaaacagtttcagcctggctgattcacagttccccagctgaagggtctgggtttcgtaagaattgactagcatgaatacttatgttatgctcagaaaaggagctgggggcagcccataggaagcatggcctcaacattaacacaatgattatttcagagagggagcagagtgggcacttcacaggcaggttatctgttctccaaagaacagatagagtatgactgttaaaaacccttggttaagactccagcaatatctaatgtgacaattatgagaatcaccattcaatgaaacttctataaatggctctgtcagcagcctctgcagaagccctaggtagaggaggccggatttgcacgagagtgaatgaacaagtgagcatgagcaccagggaaaggtgatcctgaagattctgttcatctaggttcagctcacatgcaaagggaagggaattggacttcaggtttttttatttgctgtttgtgtttttgagacggagtctcatgctgttgcccaggctggagtgcagaggcacgatctcagctcactgcagcctccgcctcccaagttcaagcgattctcctgcctcagcctccctagtagctgggactacaggcgtgtgccatcacgcctggctaggcctcggtctcccaaagtgctgggattacaggcgtgagtcaccgtgcctggccagacttcaagtttgaagggtagagtttcaagaatttgaggacatatttttaaaacaccacgactggcattctgagtacaaattgcttatatttctacgtcatgcaaaatatgctcaagaagccacccaaattgcttgagcccagaagttgaaagctgcagtgagctatgagcatgcctctgcactccagcctgggtgatagagcaagaccctgtctcaaaaaacaaagacaaaaacaaaaacagacaaacaaacaaacaaaaaacggctccaaagtcacagctttctcctggcactctcactgtctaagccagcctgccagtgtgagcaagccacctggaaaacagatccttccgccccaaggagccttcagaagactgcaagctcatggaaagaccaattcaaaagcactcagttaagcctcttccgaatttctgaccctcagaacctatgagtgatgtttattgttgtggtaagacattaaggcttggggtaatttgtaatacagccattgaaatctagtatgaaaggcttttggtcatccttttaattaataagttttttttttttttcttttgagacggagtctcactctgttgcccaggctggagtgcagtggcgcgatctctgctcactgcaagctctgcctcccgggttcacgctattctcctgcctcagcctcccgagtagctgggattgcaggcgcctgccaccacgcccagctaattttttgtatttttagtagagacggggtttcatcgtgttagccaggatggtctctatctcctgacctcgtgatccgcccaccttggcctctcaaagtgctgggattacaggcaaaccaccgcgcccagccttaattattaagtttttttaaaaaaaaatccatgccatggatgttgtaggcatgaagaaactgggattcctgtttttttttttttttttcttaatttaccattgaatagtcagatattccattaaaacaggactgacattgaatgctttctaatgtggcaagatctgcattttgaactctctcaattgctaaagccatacctataagactaacattccatcatttctcaccagtgtgggctgtctgatgatgaatggcgcgctcgtactctttacggtcttacacttttatgctcctatgaattctctgatgggctttaagggctgaaccatatctgaaggttttcccacactgcttacacacatagggtttctcaccagtatgaattctctcatgttgaacaaggtttgaagcacgactgaaggccttcccacattctttacattcataaggttttccaccagtatgaattttctgatgttgggtaaggtagccatacattttaaaggcctttccacattctttacattcatagggttttttatcagcatgaatgctctgatgtgcagtaaggtgtgaactacgtctaaaggtcttcccacattccttacattcaaaaggtttctcatcagtatgaatactttgatgtagagtaagatttctatagaaagtaaaggtttttctacataccttacattcatagggtttcataccagtatgaattttctgatgttgattaagatatccatgcaagctaaaggtcttgccacattccttacatttatagggtttctcaccagtatgagttttccgatgttgaataaggtttgagccagtactataggccttcccacattcctgacattcaaaaagtttcttaccagtgtgaatattctgatgtcgagtaagatttctatacaaagtaaaggtttttttacactccttacattcaaagtgtttcatgccagtatgaattttctgatgttgtttaaggtagccatacaagctaaaggcctttccgcattccttgcattcatagggtttctcgccagtatgagttttctgatgttgaaagagttttgaaccagtagtataggtcttcccacattgcttgcattcaaaaagtttctcaccagtatgaatattctgatgccgagtaagatttctatacaaagtaaaggttttcttacactccttacattcatagggttttccacctttatgaattctctgatgtagaagaaagtatgaggcagtggtatagcccttcccacattctttacactcatatggctttttaccagtgtgaactctctgatgtacagtaagctggtgacctcttctaaaggcctttccacatttctcacatatgtatggcttctcatcagtatgaaactgcccatgttcaacaagatttgagcgcctactaaaagtcttcccacattccttacatttatatggtttttcgccagtatgaactctctgatgaattctaagatgtccaccttgactaaaggccctcccacactcctgacattcatacggcttcccaccagtgtgaattctctcatgttgaacaatgtgtgaggcatatataaaggccttcccacactgcctacattcataggttttctcaccagtatgaaatctctgatgcacagtcagctgataaccacttctaaagttcttcccacattctgtacattcatagggtttctcaccagtatgaaatctttgatgtagagtaagttgatagccactacgaaagttcttcccacactctttgcattcatagggtctctcaatgacatgaaacctgtgatgtagaataagttgataaccactactaaatttcttctgacatttcttacattcatagagtttctctctcttatatatgctctgaagttgtgtagaggatatatctgtttcataagtgggtacttctatgtagctgattatctcacactgtaaatccaaatctgaaacaaaagaggacaacaaaaaaaatttgtatttctataccagagaacaagaaactttatgcaacaaagaaaaaccaacattcataataagtgaatggcatatagaattcaaaaatatggttacgaaatttgaaaaaggccaaaaagagttcagagacgtatgagagtttacgtaagatagtgaaattactgattgaggacataggtaacatttaggtggggccagaatctttgacaagcttgttccaaatctgctatattggcaccgtcaaagaccaagtgaattaaaactgagaggagagaaaccttgacatctttattttgaacctatcactgatttagatgcaggtcagtgtttaagaatacatcctttaagtttctcgagtgatttttcactgttcttaaaataaaatacaaatccctttccaaggactgctgcttacctaggaggtctcatgtcaaaacatcagctctttgcttcctattctctatcatagtccctcttttcaacacctggaatatagtacaattgccccttggtatctgtggaggatcagttccaggacctcctgcagataccaaaacccaacccagataccgacgccttaagtccctgatataaaatggcatagtatttgcacataacctataaacatcttcctgtatactttaaatcatctctggattacttacaatacccaatacaatgtaaatgctatgtgaatagctgttctactgttgcttcgaaaataatggcaagaaaaaagcctgtatgtggtcagtaccctcacaatttaaaaatatatgtttgatctgaagatggttgaatccatgagtgcagaacccatagatacaaagggccaactgtacaacttcccccaacacttaatgctttccacagaccgtttaactgctcaagagtccttggacttagacattttgtaggctgaatccttctcatcctttatgtttcagagtaaatgttctttctttagaaaggcagtacctgctaactctgtctgtctctctatctttatctgtctgtttatctatctatccatccatctagctatcaatcaatcatcaagacagagtcttgctctgtcactcaggctgaagtacaatagcccaatcatagttcactgcagccttgtactcttccagctcaagcgattttcccacctcagcctctcaagtaactgggactacagatgcacaacaccacacctggctaattttaaaattatgtgtagagacagggtctcactgtgttgcttatccaccgtgatcaagttggcttcatccctgggatgcaaggctggttcaacatacgcaaatcgataaacataatctatcacataaaccggaccaaagacaaaaaccacatgattatctcaatagatacagaaaaggcctttgataaaattcaacatcccttcatgtcaaaaactctcaataaactaggtattgatggaacatatctcaataatagctatttatgacaaacccacagctgatatcatattgaatgggcaaaagctggaagcattccctttgaaaaccagtacaagacaaggatgccctctctcaccactcttattcaacacagtactggaagttctggccagggcaatcaggcaagagaaagaaataaaagtattcaaacaggaagagaggaagtcaagttgtctctgtttgcagatgacatgattttatatttagaaaaccccatcatctcaggccaaaaactccttaaactgataagcaacttcagccaagtctcagggtacaaaatcaatgtgaaaaaatcacaagcattcctttacaccaacaatagacaagcagagagccaaatcatgaatgaactcccattcataatcgctacaaagagaatgaaatacgtaggaatacagctaacaagggatgtgaaggacctcttcaaggagaactataaaccactgctcaaggaaataagagaggacacaaataaatggaaaaagattccatcctaatggataggaagaatcaatatcatgaaaatggccatactacccaaagtaaattatagattcaatgctattcccatcaaattaccattgacattcttcacagaattagaaaaaaactgttttaaattttatatggaatcaaagaagaccccgtacagccaagacaatcctaagcaaaaagaacaaagctggaggcatcatgctacctgacttcaaactatactacaaggctacagtaaccaaaacagcatggtactggtaccaaaacagacatataaaccaatggagcagaaaagagacctcagaaataacaccacacatctacaaccatctgatcttcaacaaacctgccacaaacaagcaatggggaaaggatctcctactcagtaaatggtgctgggaaaactgggtagccatatgcagaaaactaaaactagaccccttccttacaccttatgtaacaatcaactcaagatggattaaagacttaactgtaaaacccaaaaccataaaaaccctagaagaaaacctaggcaatgccattcaggacataggcatgggcaaagatttcatgacaaaaatgacaaaaaccattgcagcaaaagccaaaattgacaaatgggatctaattaaaccaaagaccttctgcacaggaaaagaaactatcatcagagtgaacaggcaacctacagaatgggagaaacctacccatctgacaaaggtctaacatccagaatttacaaggaacttaaacaaatttacaagtaaaaaccaaacaacacatcaaaaagtgggcaagggatatgaacagacacttctcaaaagaagacatttggctgcggtggctcatgcctgtaatcccagcactttgggaggccaaggcgggtggatcacgaggtcaggaattcaagaccagcctggccaacatggtgaaaccccatctctactaaaagcacaaaaaaaattagccaggcatggtggcaggtgcctgtaatcccagctactcgggaggctgaggcaggagaatcacttgaacgcgggaggtagaggttgcagtgagccgagatcaagccactgcactccagcctgggtgacagagtgagaatccatctcaaaaaaaaaaaaaaaaaagaagaagaagaagacatttatgaggccaacaaacatatgaagaaaagctcaacatcatcatcagagatcatcagagaaatgcaaatcaaaaccacaatgagataccatctcacaccagttagaatggcgattattaaaaagtcaggaaacaatagatgctggtgaggctgtggagaaataggaatacttttatactgttggtgggaatgtaaattagttcaaccactgtggaagacagtatggcaattcctcaaggatctagaaccagaaatacatttgacccagcaatcccactactgggtatatacccaaagaaatataaatcattctactagaaagacacatgtgcatgtacgtttactgcagcactatttacaatagcaaagacttggagccaacccaaatgcccatcaatgatagactggataaagaaaatgtggtacatatacaccatggaatactatgcagccataaaaagaaatgagatcttgtcctttgcagggacatgcatgaagctggaggccatcattctcagcaaactaacacaggaacagaaaaccaaataccacatgttctcactcataagtgggagttgaacaatgagaactcatggacacagagaagggaataacacaccagggcctgttgggggctgggaggtgaggggagggaacttagaggacaggtcaaaagatgcagcaaaccaccacggcacacgtatacctatgtaacaaacctgcatgttctgcacatgtatccatgtatcctgttttttttttagaagaaaggaaaaaaaaaagactactgatgtcacacagatacaccaaaaaggtatgaaagggtttataactctcatcatgaggctttctagagagcagagcagctcccaagcaggtcataaaacaacttgagagattaggaaaaggaggctggcttggagtttgcatggtggttagggtgtggtgctgggctgagtgttcctgctcatggcatggggttcacatggtttgaatgagaaggagggagcacctaggttttttaccagctggcccagaagtagacagaaggggaaaaaaaaagaggagtcatcagcagttaaacatcaaaaacagagtcagggactggagtggtggctcacgcctataatcccagcactttgggaagccgaagcaggaggatcactcaagcccaggagttcaagaccagcctgggcaacacaataagacctcttctttacaaaaaaaaattaaaaacttggctgggcatggtggcatgcacttgtggtcccagatattcgggagggcaaggtgggagaatttctagagcctaggcggccaaagctgcagtgagctgtgttcacgccactgcactccagcccaggcaacagagcaagaccctatctcaaaaaaaaaaaaaaaagaaaaaaaaaaagaaaaaagaaaaagaaaacacttttttttttgagatggcatctcgctctgtctcctaggttggagtgcagtggtgcgatctcggctcactccaagctctgcctcccaggttcatgccattctcctgcctcagcctcccgagtagctgggactacaggcacccgccaccacgccccgctaaattttttgtatttttagtagagacagggtttcaccatgttagccaggatggtcttgatctcctgacctcgtgatgtgcccactttggcctcccaaagtgctgggattacaggcgtgagccaccgtgcccggccaggaaatacttaaagaaaaaaaatgctctgtcactcaggctggagtgcagtggtgtgatactggctcactgcaacctttgcctctcaggttcaagcaattcttgtgcctcagcttcccgagtagctggggccacaggcacccaccactatgcttggctaatttttttgtatttttggtagagatgaggtttcgccatgttggccaggctggtctcgaactcctggcgccaagtgatttgcttctgtctgcctcagcctcccaaagtgttaggattacagacgtgagccactgcattcagccaagactttaatttttttggggggtgggggtggtaggatggagtctggctctgttgcccaggctggagtgcagtgacacgatctcagctctgcaacctctgcctcccgggttcaacggattctactgcctcagcctctggagtagctgggattataggtgcttgccactacgcccagctaatttttgtatttttagtagagacagggtttcaccatgttggacaggcttatctgaaactcctgaactcaaatgatctgcccgcttcagcctcccaaagtgctgggattacaggcgtgagccaccacacttggcaagattgtaatgttttgaaagcagttttaaccatctctattttctaatgaactataatgtacatagaggatttcttaatgttataaatatttctttataagggttataaataattctgtatttctctattaacatggtatgaaataaagaaagcaaattatccaaagtctgattaaccaaagacaatccaaagtctgagtggaacatttaatcaataaagatccagaacttcatagatacaattcaaatactgcagagctcagttaccttccagtcacacacagattgttcctaaaaactgaccatatactgggctataaagcaagtttcatgtatttcaaaggatcaagattgtatagagtatgtagtctgaccacaagaaaaattttatgctagaaatcaatactgcaaagataactagacaacatatatttggtaattatatactgcttgtaggtaatcaatatactgaacaaacagtgcactgtgatatgataaaataacaaactttggaaaatgatgttttgactgaaaattataaggccatacactaaaggaagtatatacaaacactactcaagtgagtaaacttgatgctcatgggggtacaggttaacaactcagaaatgtgttacacatacactggagttgaatagatacagaaataaatggtggacggggagagccagttttcctgctgtcagggtaaaaagttacatataaacaagacaggaagattagaatacattttgtagtagtagatgagagtcagagacattagtatgaactcatgtttagcttcagatgcatacaaatggatagacaaaaagacaattattaatatatgtaagcatacatcggcgaatgtgcatatatccattacccagaccttgttttttttttgggacggagtcttgctctgtcgcccaggctggagtgcagtggtgcgatcttggctcactgcaacctctgcctcccgagttcaagcgattatcctgcctcagcctcccaagtaactggcattatgtacagacccgcgcctccacgcccagctaatttttgtatttttagtagagacggggtttcaccatgttggccaggctggtcttaaaaactcctgacctcgtgatctgcccgccttggcctcccaaagtgctgggattacaggcgtgagccaccgtgcccagctgaccttggtttttaaatcccattctccactaaaaggaatcacactcctgggagaaacagctgattccaggaccacgggagggagaaaacaaaatgaacctgaaggtagtaccaggaaagaagtcctcaaaaaacagaaggatcagggtattaaatgaacataggaaccaagctaaaagagctatcaatgtctgaagttgaaacggtatgggtggcaaaagaagtaatgtaatatttgattctaccttgaagtataaaacaaatataaatgagtctacactgatatgagaagaaacaaatatgtcttatagaagaattctgtctgaagttgaaacggtatgggtggcaaaagaagtaatgtaatatttgattctaccttgaagtataaaacaaatataaatgagtctacactgatatgagaagaaacaaatatgtcttatagaagaattctatctgaagttgaaacggtatgggtggcaaaagaagtaatgtaatatttgattctaccttgaagtataaaacaaatataaatgagtctacactgatatgagaagaaacaaatatgtcttatagaagaattctagatattaaactctatggaatgtaaagcttaatttccacttctatgtacctgctcccagggtgggctagacttaacaagttgtttctaaagagtagagaatggaaaaggaaaaaatagtacatttggagtgaagaaacctggcagacactactttagccaaatgataaaggttaatatcaccagtgatgtcatgtacccctgatgtaatgtgatgaaaagcatacttcacctctcttacagtctttctttttttttttgagatggagtctcactctgtggcccaagctggtcggctcactgcaaactctgcctcccagattcacgccattctcctgcctcagcctccaagtagctgggactacaggcgcctgacaccatgcccggctatttttttgtatttttagtagagacggggtttcaccgtgttatccaggatggtctcgatctcctgacctcgtgatccacctgcctcggcctcccaaagtgctgggattacaggcatgagccaccgcgcccggctgttacagtctttctaaaaactactacttccagcctaattacaaaaaaacaacagacttggattgggagaacactactggcatggtctgtcaagacagtcaaagtcatgaaaaacaaagaaaagcagaaaaaactgtcacagaacagaagagactggaagataagacaaatgtatacaatgtggtacccctaactggatgcatcttggaacagaaatatgagctatatggaaaaactggtgaaatcccaatggagagtctcatgtcagtttcctagttttgacaaacatactttatgtaagatgttaacaatggtggaaagtgggagagatgtatacaggaaatctctgtattatctttgtaaatctgtaaattttgtaaatctaaaattattctaaagttaaaaagttattttaaaaaaagttaattaccagtggtctttgtttggttggtggagaaaagaaaacaaacaaaaacgatcattacgcactacttctgcaatattcttggcaaaaaatgtttaatcttactctaatcatgaggggaaaccatcaaacctataaatctgacattccacaagaaaactggagtagacacttcaaaaaagccaaacccaaaggggaaaatgtagtaaggtaacaccaagataaaaagcctaagacctggctgggcatggtggctcatgccttaaccccagcactttgggaggccaaggcaggcggatcacaagttcaggaattcgagaccagcctggccaatatggtgaaaccccatctctactaaaaacacaaaaattagccaggcgtggtggcgggcgcctgtagtcccagctaactcggaggctgaggcaggagaatcgcttgaacccaggaggcagaggttgcagtgagccgagatagcaccactgcattccagcctgggcgacagagcaagacttggtctcaaaaaaaaaaaaaaaaaaaaaagcctaagacctaaatgcaatgtatgaatacacaatggatcctggaaacattttataaatgacatttttagaaacagcataacaaatgtaagtatagactctatagtagataagactacattactattataataatattgtgactttgaaggagaatgtctttattcttaggagatgtacatagttaagaggtgaaatttaatgacaactgctacttaccatcaagtgagccaagaagaaaggtgcatatatacagagaaaaagtaaggcaaaatgttaataaccaaagatgaatctatgtgaaaggtaattaactgtatatatattatatattatacattatacacatacacacacatacatatatacacaaatatatatttttaaaatattctcccttggcttgatgatttttaaaataaaaagctggggaaaggaaacagcaacccagaatttaaggagatattacctaaattcccatataaaattatttttaaccaaataatagtaggtttatatccatttatatttgatagcatgaaagaagaaaaaacaatttataaagcagatgtaaatacatatgagaaaaggagaaaacttgaaaattggtgacctatatattcatcacaagaagctggaaaatgcaacaaataaacaaaaataagatataaaagtccagtaattttaaaaaatggagttcacaaataccacagaagagccaaaacggcagatattttatttcaaactaatgttactgatgcaattctctcaacactgatgaagaaaaaagtaaatgctacaatatccaacctaggagtgctaccaggtacctcagctatagctctccacactgcacaaacacagtaagatggcattaggataaaaacatgttactaacttgcttgaaatgcataaaactctaaaaagtagccactgcaaaatcaacacacagaaaacttggacaattctataagcattatgtaatttgcataagtttttaaaaagcacaatggaaactgaagtttcagatttttttttctggagtgtttcttcagacattctaagagggggtaaaagggtacattccctcaacacatgtatgaagctaatgaaacacatccaacattatttttttttaattttttttttttttgagatggagtctccctttgttgcccaggctggggtgcagtggcacgatctcggctcaccacaacctccgcctcctgggttcaagcaattctcctgcctcaatctcctgagtagctgaggctacaggcctgcgccaccatgcctcactaatttttctacttttagtagagacagggtttcaccatgttagccagactgggtcacaaactcctgaccgcaagtgatctgccggcctaggcctcccaaagtgctgggattacaggcatgagccactgcgcccagccatccaacgttaggaaggataatgaaaaacaaaattgcaatccaatcccactcatgaaacctaaagaaaacattaaaagttcagatataattgataagagataaaatatcaacacatgatgaccaaattggagtccagcatgcaaggttagtcaagtactagaattcaacatagtacagaataatggaggaaaaaaatcgtatgaattttgttaatacatgcagaaagaatgattcctaagaaaaattttagcaattgtataaaaaagcaaacctcctccatgtgaaagagtatttatataaattgttaaaaaacataccttagccagacacggaggctcacacctgtaatcccagcactttgggactctgaggcaggagaattacagcagtgagccgagatcacactactgtactccaaccccagatgacagagcaagacccagtctcaaaaaaaaaaaaaaaaagtcaactgcctttttcttgtggaaaatgacaagctgaactaaaattcatatgtgaatatagaagactcagaatagccaaaacaatcttgaaagacaagaattcaagtatcagtactcatactttgtgacttcaaaactttttataatgctacagtaaatcaagcagtatatagtactgtatatagacagtatatatactgtctatagtagtatagtatggtatatatactgtgtatatatacagtatagacagcatatatactgtgtatatatacagtatagacagcatatatactgtgtatatatacagtatagacagcatatatactgtgtatatatacagtatagacagcatatatactgtgtatatatacagtatagacagcatatatactgtgtatatatacagtatagacagcatatatactgtgtatatatacagtatagacagcatatatactgtgtatatatacagtatagacagcatatatactgtgtatatatacagtatagacagcatatatactgtgtatatatacagtatagacagcatatatactgtgtatatatacagtatagacagcatatatactgtgtatatatacagtatagacagcatatatactgtgtatatatacagtatagacagcatatatactgtgtatatatacagtatagacagcatatatactgtgtatatatacagtatagacagcatatatactgtgtatatatacagtatagacagcatatatactgtgtatatatacagtatagacagcatatatactgtgtatatatacagtatagacagcatatatactgtatatagtacatagtaccgtatatatactgtatatagtacatagtaccgtatatatactgtatatagtacatagtaccgtatatactgtatatagtacatagtaccgtatatatactgtatatagtacatagtaccgtatatatactgtatatagtacatagtaccgtatatatactgtatatagtacatagtaccgtatatatactgtatatagtacatagtaccgtatatatactgtatatagtacatagtaccgtatatatactgtatatagtacatagtatcgtatatatactgtatatagtacatagtaccgtatatatactgtatatagtacatagtaccgtatatatactgtatatagtatatagtacagtatatagacagaaagactatgtgtgtatatatatacacatacacttacatatatctcaaatttatgattaattcattatcaaaaagggtgccaacaaaattcaaaggagtctctttagcaatagtgctagcacaactggatattcacatgcaaaagaatgaagctgggcatctatctaccctttgtatcacatatgaaaattaactcaatgtggatcaaagacctaaatgtaagagctaaaactactaacttagaggataacatagaagtaaatcgtcatgaacttggattacaaaagtttcctagacaataatatcaaaagcacagcaacaaaagaaataataggatggaatagaatattattcagccataaaaaaagaatgagtattgatacctcctattatatggatgaaactcaaaaacattatgctaagtgaaagaaagtcattcgcaaaaggccacatgttgcttgattccttttttatatgcagaataagcaaatctatcgatatcaaaggagattaatggttgccagaggctgagagtgagaggatagggaatgactggcaatgtgtatgagctttcttttctctttttttcagagatgaggattttgctctgttccctaggctggagtacagtggcatgatcatggctcactgcagcctcaaccttcagggctcaagccatcctcccatctcagcctcttgagcagctgggacaacaggcacatgccaccgtgcctggctaatttttgtactttttgtagagacaggatcctactatgttgcccaagctggtctcaaacccctgggctcaagcaattctcctgtctcagcattccaaaatgctgggattacaagtatgagccatggcatttgaactgtataatttttgtaaacttttgtctaacattatttcaggctgggtgtggtaactcatgtctgtaatcctaacactttgggacactgaggtgggaggattgcttgagcccaggagttcaagatcagcttgtgccaaaaagcaagaccccgtctctacaaaaaaatttttaaaaaatcagccggggttggggcagggggtgtggcacacatctgtagtatatattttagttatatattagtgtacatctattcatgcaaaattgttatatttcacagtaaaattttattattattttaatttttgtgggtacaatgtaggtgtatatatttatggggtatatgagatattttgatacaggcatacaatgtgtaataatcacttcagggtaaatggaacatccatcacctcaagtatttatcctttgtgctacaaaaaatccaattatattcttttagttattttaaaatatacaattaaattattattgactatagtcactttgttgcgctatcaaatactagatcttatttatcacagtaaatttttttttaaagagaaaacagtagctataaaagacaggcagaagaagtatatttgtaaatggaaatatatggtattcaaaataaaaacagaaagaactggagattattaacattttaagatattactccagaaaagtttctggacattatcagcacatgaattatatattaaaaagccactatgtataccaaggaaaactaactagaatggtccatttaaagcacatactattagagttctatgacttcaaaaaacaaaaaaatttttatagttgccaggcaaaaagatcaagtcactttgaagggaggaaatatccagtgggcattagagttacacttagtgttacttaaactcagaaagtaaaggagcaataggtacgaagttctcaagaaaagtaagatgaattaagaatttgatatccaaagtatctttcaactacaaaaatagccaatagtttaaatatacaagaactctcacaatatatttctcctgatctcatcttggcaggctctttggtcattatcaacagccgggaaatggagaactgggaacatacagcgactacaatgtcagatacataaaagggagtaaaagataaaagtcatgttcctagaaaagttgggagaatgtctaaagaagtaattcatgtaaaaatgctgatttggggacaaacatccatgaatgttgtgtggtcaatttgtataatattccatggaaaagactgtcatttaaagctagcatatcaaataattgaaaagaatggccgggcacggtggctcacgcctgtaatcccagcactttgggaggccgaggtgggtggatcacgaggtcaggaatttaagaccagcctggccaagatggtaaaactctgtctctactaaaaatacaaaaattagccgggtgcagtggcaggtgcctataatcccagctactacggaggctgaggcaggagaatcgcttgaacccggggggcagaggttgcagtgagccaagatcatgtcactgcactccagcctgggtgataaagtgagactccacctcaaaaaaaaaaaaaaaaaatgaaaccagaaagcataatacaaaaagaaccaaaaattgtcatacaataaatgtaaaaatgtgaaagtctctattaaatggcttttgcttgcattccagaaaaaaaatccatttctagatttcatttaaaaaaaaaaagactctaaaatagaatgatgagaaagggtacagaaggcaaagtttaaaaaaaggtatcttaatcttgatatcaaaaaattttgaattaagggaacaaattacaaaatagaccaaatggcactccataatattaaacaatgaaataacaatgaatttaaaagttaggaacagccacacaacataacacctactatcaaatcaattttcaaagaaaaagaattaaaagatttctaaaaataaaaagtaactaattagaggtaaagaataacagtctcaaattaatagaataaatctattttatttattttttttgagacagagtctcgctctgtctcccaggctggagtgcagtggctccatctcagctcactgcaagctccgcctcccgggttcacgccattctcctgcctcagcctcctgagtagctgggactacaggcccctgccaccacgcccggataatttttgtatttttagtagagacagggtttcactgtgttagccaggatggtctcgatctccttacctcgtgatccgcccgcctcggcctcccaaagtgctgggattacaggcgtgagccaccgcacctggcccaatggaataaatctaaataagcactgatgaaatctaattacaatgcttatctctgataataaactttatttcaagtggacaaagaatacttaaaacattgacctcagagcattcatggaaatctaaccacatagagcgccaacaatttgttgagttgacatttcaacaagttcttgaagaattaggaacacagactttaatctctaacaagaacatagtaccattggaaatttatagcagtatcagagagcaatttctattacatgaagtaaaataactctattttaattgacctgaagcaaggggccaaaataaactaaaattataactgtgtaaacattatataactagatagaacagcaaaatctgtgctcaaagcaaaatctatggccttaaatactgaagagatcaaaaaagaatgaaaataagtgagtaattatgactcacaaatttcaaaatcagaaagaaaataaattgatgcaacagaagaggcattggtaaaatcagagcaaaaatgatttactgtatttagaaaaatataaaacaactgcaaaatggttcttcgcaaaaaaaaaaaaaaagttaaatgaggcaatgcagtaagaataaaaggcaaatttcctaatacatgaaataaagaataacatgaggaaattaatcacttttataaaccttgtaagaaaagcccactacttgggctcaaccctgtgctctttcgcttaggttaacacgctaacctgtattatcccaccactgacccttcagggaagcctgcagggaaaacagatgtctggctgtctcctaatgactgatactgtgaaaaggctgttggctcctatctgcgaagtgggcacagagttgttatatctcagtaaactgatccttattttacctaggatcaatgtcggcctaccaacttcctttctcagaataagagatctttagatcacttaattcaaggagatttcgtgggcctgatgccacttaaagaactttactgttgaagggaaattctgccatctccttcttcccccaaacctcttcatgttatgctttatgagggctgaaaaatgttaagaattgtacatacggtttcagaaatagtagattaagatcatgggattaaagcacagaactcctcaacggaggtgcataaaattgcaggcatggtcactcaaaagagagctgctttagatgcaatgctggtctaagggggcaggcttatgtgctgtcttatgggaagaatgttatatcactagaggtctctgtggaatctttaatattactaatattaatgactcagaaaacagagtcgcaataacattaggaaacttgcagaatgctcccacttacctagttataatggctctttgcattcggtaaggaatctgttcttttgttttaatttggcctctgttggctcctgatttaggagactataaactgtgattgcaattcttccctaaatacgtttgttcaaaagtgtgatctccagaataataaaatgctactatatcattttatatatatacaatatataatctcatattatgataaaataataaaatgctactatacagtcatatatatagcaatgctactatatatgttccatcgaatgagccaacaaattatcttccaacaaaaggaatacaaaaatatgaaatgtatggagattagaataaccatgagggaaaacttttaaaaacacaatgataacctcaaacagcactgtacatctgaactagtgttcccacataagtttatcttccatctcaagcagaaggatgaccaaaaatggaaaaatgggggttactgaaaagtgaaaccaacacaatcccctcttaaggccaattgcttactcatcaaggctccaagtatctcacctctcactgcctacccacactaaaattattattgttgttattattattattattatttttgagacagagtctcactctgtcgcccaggctagagtacagtcgcatgatcttggctcactgcgacctccacctcctgggttcaagcaattctcctgcctcagcttcccgagtagctgagactacaggcgcccgccaccgcgcccggctaattttttgtatttttttgtagagacggggtttcaccgtgttagccatgatggtctcgatctcccgacctcgtgatctgcctgcctcagactcccaaagtgctgggattacaggcgtgagctaccgcgcccggcccacactaaaattatgatgtcatagactcagccccatcccaattagttcgctctgttttgcaaaacctgccttaaaaattacttttacactgttggtgggactgtaaactagttcaactactgtggaagacagtgtggcgattcctcagggatctaaaactagaaataccatttgacccagccatcccattactgggtatatacccaaaggaatataaatcatgctgctataaagacacatgcacatgtatgtttattgcggcactactcacaatagcaaagacttggaaccaacccaaatgtccaacaatgatagactggattaagaaaatgtggcacatatataccatggaatactatgcagtcataaaaaatgatgagttcatgtccgttgtagggacatggatgaagctggaaaccatcattctcagcaaactatcgcaaggacaaaaaaaccaaacactgcatattctcactcataggtgggaattaaacaatgagaacacttggacacaggaaggggaacatcacacaccacacaccggggcctgttgtggggtgggggtaggggggagggatagcattaggagatatatctaatgtaaaggatgagttaatgggtgcagcacaccaacatggcacatgtatacatatgtaacaaacctccatgttgtgcacatgtaccctagaacttaaagtataataaaatatatatatatatatatatatatatatatatatatatatatatatatatatatatatatataaaattacccagttgctacttttctgtggagcacgttttttaaaaaaaaaaagaggctggacgcggtggctcacgcctgtaatcccagcactttgggaggcaggggtgggtggatcacctgaggtcaggtgttccagaccagcctggccaacatggtgaaaccccgtctctattaaaaatacaaaaattagccaggcttggtggcacacacctgtaatcccagctacttggaggctgtggcaggagaattgcttgaacctgggaggcggaggttgcagtgagctgagatcgggccactgcactccagcctgtgcgacagagcaagactccatctaaaaaaaaaaaaaaaaggaaaaaaaaaattacccagtctggttctaaaacctgataagtaagtttcctggtttcttattttaagatactactgttactctttcaagaggttgttctcccttttttgcaataaatctaataagcttagctttgctagatgaacagaaatgtctggtaattcttggaagtcaacagtatatagacaccctaggaagtatatgaaaaatatcgttaaatatagaaaaataaatattttgaaatatcataaacatataacaagtaagtccaactcaaaataatacaaagtaccagaataatgaagatatatcaggaaggctgctattttcagacaaaaatcagttgctttctaatatatcaataataactaattataggctgatatatcaatatatctaatatatcaataataactaattataggctcacacctgtattttcagcactttgggaagccaatgcaggaggactgcttgagcccaggagttagagaccagctgagcaacccagtgagacccccatctctaataaacaaacaaacaaacaaaataacgaatcacacaatatagaagtatataattacatattatagaattatgtgttatacaagttcttaatctctgacaagaacatagcaccattagaaatttatagcaatatcagagaacaatttcttttacatcaagtaaaagaactctattttaattgacctgaagtttaactgtaactcaaaagtttataaacatttaataaaatacaaacatagatttagttttaagggtttttaaaaactatcatttttcaaatttctttttaaaaattatagtttagaccaggcgcggtggctcacgcctgtaatcccagaactttgggaggccgaggcaggtggatcacgaggtcaggagattgagaccatcctagctaatacagtgaaaccctgtttctactaaaaatacaaaaaaattagccaggcgtgatggtgggcacctgtagtcccagctactcgggaggctgaggcaggaaaatggcgtgaacccgggaggcggagcttgcagtgagccaagatcgcgccactgcactccagcctgggcaacacagcgagactctgtctcaaaaaataaataaataaataaataaataaaaatgaaaataaaaattatagtttaagttagagtgtagaacttacgttgttggtttctttaccctaatttaataatggcgtatcaaccttcactcgtctttgttcattttcactgcaactggataaatgattagatattactgccagtgtggcaattcctttagtatatgtaaaatttggacaagatgaaatggagaagattatttttctcagcttcagcaataagaaatgcaaacgataaagactgacattgttcacatacatgatttggagttttaagatttgtataaagcatgttctggtgttgcagcttcaaaagaacaggaaaatactccagagtgattggccacattgccacacatacgtacatagctgccagttcaatgagttaagagggcctagcacgaagagggtccacgagcaattaccatacctaagcctagatctggatttctaaatggcgttcccaataaaaggaactggtgctccttacagaagtggctgattccagggctatggcaaagaaaatataagataatcctagattaacaacttgtagtaccagaaaataagaaatgctcaccaaaggtgagcaggttgaaaaggcacagatgccaacttgaaagagttcccaatggccaaagcagaagacaaataactaaggatagtataggattataactcatggaataaaataaacatctatgagtccatattgatataaataattgaataaatagaggaaaaagggagtattccttcttacagaagaattccagctaatgggccaggtgcggtggctcaagcctgtaatcccagcactttgggaggccgcggcgggcagatcacaaggtcaggagttcgagaccagcctgaccaacatggtgaaaccccgtctctactaaaaatacaaaaattagccaggcatggtggtgcatgcctataattccagctactcaggaggctgaggcagaagaatcacttgaacctgggaggcggaggttgtagtgagctgagatcgcgccattgcactccagcctgggcaacagagtaagagtctgtctgaagaaaaaaaaaaaaatgtttccagctaataaatgtaggaggttaatgcaaaatcatcagtaggcaaatgttgcattaaagatgtgtacaagcaggccgggcgcagtggctcacgcctgtaatcccagcactttgggaggctgaggcaggtagatgacctgaggtcaggggctcaagaccagcctggtcaacatggtgaaaacccatctctacaaaaactacaaaaattagctgggggtggtggcacaagcctgtaatcccagctacagcgcctgtaatcccagcctgagcctgggaggcggaggtggcagtgagccaagacagcaccactgcacctgcactctagcctgggtgacaaagtgaggctctgtctcaaaaaggaaaaaaaaagaactggtataagcaaaatctactgttggaagctaaaatctgtggtggggatcagggggtgtaaaagttggaggagaaataggatatctgtattgttttcctgggactcacaaaataataccacaaaatgaagtccgcaaagcatcctcagaagcaaaagttttttctcggaccttctcttgccctcctgtctctcagtcccattctccccctaggctaaccataaagactagaagccctcttccccaaggcaagtcatggaaaccagaaccccttgtccccagagctactcataaaacctaaaaatattactctaactttcccctgcctttttgggtaaaaactggccataaaaaattccctggcctactttgtttgactgttggtcataagacccccattccagagagtgtcccccattccggaaggaaggaatacgtgttctgagaggccaagaagaacctagacagacaggccttgctgggtttccctactcaggctattagcattagatcacaccctttttgcccaatcctgtttctacatagctgtccatactttgttaaacctaagcataaaaataggtaatttcccctgtacctttggatcttctttctaaaggctcctgtgtcatgaaaaagtatgattagatcaatttgtatgccttttcttctcaatctgccttttgtcagtgattttcagtgaaacttcagagggtgaaaaagaagtttttccttggcccggacagatacaattatgaaaagcatctcaaacaagttatatcatattagcattgcctaaggcacaaattcttatttcaccaaattataatattagcattgccagtggaacaaactattattgtctcctcatgtgatacaatgggaagaatagaacatcacctgggggcaatttttcaaaatatgttgggcttgaatttaatcataaggaagtgataatacattgcagattgtagacattctaaaaagaaatcaagtggactggactttgcaaagatgtcaatttcatgaaggaagatgctctgaattaaaggatattaaatagatttggtgagtaagtatgacagatgttccttcagttgatcctagattttaaaatttataaaaggacattactgggataattgggagaaatttggatgtggactgtatatttgataatattcttagagaattgtgaaatcacttgggtaatgtgggcaaagggttaacaaaacattttctaatgttctgtaattaaacattaaacagaatgggaatcccattctgcatgaggatgtactcttaggctaactctccaatgctgcttccctaaaaacagaatgtgtcaactatgttaataagtttcattatttatggtaacaatgaccctgattggcaagttgcacctcggactgtggactaggggctagatgaagagaacaccatatttagggtttctttgactacatttctttttaaaagagcatatccttgaaagaccctggaaacgatgactaaagaatcctcacaccagatattgtaccaacctttggagccagtctttttttttttttttgagaaggagtctcattctgtcaccaaggctggagtgcagtggtgcgatctcggctcactgcaacctccgactccctggttcaagtgattctcctgcctcagcctcctgagtagctgggattacaggcatgcaccaccacacccggctaattttttatgtttttggtagagacagggtttcaccatgttgaacaggctggtctcgaactcctgacctcaagcgatccacctgccttggcctcccaaagtgctgggattacaggcatgagccaccgcgcccagccaaaccagtcttcttaagtcaggggaggcccacactcctgccgtgtggatctcatttcctagcacttgagctctagcacctgtggaaaagagagctcctggaaggctgtctcatatgcatgaatcactgcagccatgccacagggtgctgagcaccaaatacccaagaacaactatagttatatatatatatattataaatatatacttaggttaagagtaaatatcagggccagttaccggggctcaagagtgtaatcccagcactttgggaggccgtggtgggcagatcacttgaggtcaggagttcgagaccaccctttgtattttgtaaaaatacaaaaattagccaggcatggtggcacacacttgtaatcccagctacttgggaggctgaggcaggaagatcgcttgaaaccagaaggcagaggttgcagtgagccaagatccatcactgtactccagcctgggcgacagagtgagactgtctcaaaaaaaacaaaacaaaacaaaaaaaacagagtaaatatcagtcataagggagaaagcatatgatgcaatgactatatatttcataatatgattacagtgaaactaaaaattgggaggagactgggcatactaaaaaactgttttcagtaatcatttaggtagtaaagctgttactaatgttctaagaatgttttatgtgtcataaagaataaaggaaatgactgggcatggtggctcatgcctgtaatcccaacactttgggaggccaaggtgggcaggtcacctgagtttgggagttcaagacaagcctgaccaacatggagaaaccccatctctactaaaaatacaaaattagccgggcatggtaccgcatgcctgtaatctcagatactctggaggctgaggcaggagactcgcttgaacccaggaggcagaggttgcgatgagccaagatcgcaccttttcactccagccagggcgacaagagcgaaactctgcctcaaaaaaaaaaaaaaaaaaatagaataaaggaaatgaatacttgcatggtattttaattttatcatcactggagtattggagaattggtactaaggaataagagatacagatcaaagacagaaaatttcaattaaacaccatttagttctaagtttggccaggaagttgccatataaactcattaggtaatttatttttatgtaaatatgtaaacacatacatatatgtatacttagagtttttttttgttttttttttttgttgtttttttttcttaagacggagtgtcgctctgtcaccaggctggagtgcagtggcccgatctcggctcactgcaacctccatctcccggattcaagcaattctcctgtctcagcctccctagtagctgggactacagaccagtgccaccacgcccagctaatttttgtacttttaatagagacggggtttcaccatgttggccagaatggtctcgatctcttgacctcgtgatctgcccgccttggcctcccaaagtgctggcattacaggcatgagtcacttttttttttttttgagacggtgtctcgctctttcacccaggctggactgcagtggtgctatcttggctcactgcaagctccacctcccgggttcacaccattctcctgcctcagcctcccgagtagctgggactacaggtgcccgccaccacgcccgacaaactttttgtattttttgtagagacggggtttcactgtgttagccaggatggtctcgatctcctgacctcgtgatccgtctgccttggcctccgaaagtgctcagattacaggcatgagccactgtgcccggccttttttttttttttttttttgagacggagtttcactcttgtcgcctaggctggagtgcagtggcatgatctctgttcactgcaacctctgcctcctggattcaagtgattctcctgcatcagcctccccagtagctggaattacaggtagccgccacaatgcctggctaatttttgtatttttagtagagatggcgtttcaccatgttggccaggctggtcttgaactcctgacctcaggctggcctcccaaagtgctgggattacaggcgtgagccaccacacccagtcacttacagatttttctatctttaactggtaaaaagcctataacaatcttcaaccaagaaaaatgggcacttctagaggctagactgtggccttaaaataccatttcccactaaaagaacccaatagttcacaaacttatggctgactaaaggcttggtacaggaaacgtacaagataagcctgcaacactttgtcatatcagatgggagaaggctggcaataaaataaccgtctaaatctgggagtggtggctcatgactgtaatcccagcactttgggaggccgaggcaggcggatcacgggaggtcgggagttcgagaccagcctgaccaacatggagaaaccccatctctactaaaagcacaaaattagctgggtgtggtggcacgtgcctgtaatcccagctactcgggaggctgaagcaggagaatcgcttgaacctgggagacggaggttgcagtgagctgagattgtgccattgcactccagcctgggcaacaagagcaaaactccgtctcaaaaacaaaaacaaaaactgtctagttacctatgaaggatcctaggggccaggcacggtggctcatgtctgtaatcctaacattttgggaagccgagtccggtagatcatctgaggtcaggagtttgagaccagcctggccgacatggcaaaaccctcctctctactaaaaatataaaaattagccgagcatggtggtgcatgcctgtaatcccagctacttgggaggctgaggcaggagaatggcttgaacctgggaggtggaggttgcaatgagccaagatcacaccattgcatttcagcctgggcgacaagagcaaaactccatctcaaaaaaaaaagaaaagagaaaagaccaaatattgatcagcctttattttccaaatggtatcagtagttaccaaatagtaggtgatgtaaaaaattgtttatatttgtacataataaatgaaaaataaatgttagaattagaatatgaccattttggaatgtctgatgaattaatacatccaggcattgagcataaatgactgctaaaaatcacagagagacaaccagaaggtttatgctgagaacctaaaccattcactcccacactcagccttgaaacagagaagtggacctaccaatccccctacaggtagcttactctctccataaacacatcccactgttttcctcagcacaattttactgttctggaagtttcttgcaaaggcaaatggcttcattgttcattactggaagttcctgaaagatccatcaactcttaaatggcaaacatcaacagtttgtactctagaaaattttcaattcctaacctcaaaattctaacctagctgtttccactaattctccactgtggtgtcttcatctttacctaatcctaatcaagtccccgcatgaagaccagccttaaaccaaacttttaattctcagtaaaagccatccttgcccttctgcctctgagatactatataaagctcttcagaggtggtgttttcctttaacacagtaaaccataagcccagctctgtctggtatgaggggagcaggaaaagtgccaacatatgatgcatacaatactgcccaggaagttgtcttgcaataaaataaataaaataaactgaatcaaaatcgattaagtgtaacagtgaaataaatctagcatagctgactccatcttacttctaacctcacaagctaatggcgtttgctcataactgcacgctggccaagttaactatgggagtatttaatttatactataactttaaagcaaggataataatccctttccaaaactattaataattctcaaggagatagggagggtgtacatacaagtaacaacgttatgttaaagatttataggagcattgtgacctgaccgaggacaacgttgtgcaaccttctcggacccctgctgacacccagatatctgtagtcgccagtcacctcctgacctcaacctcctcctagttcccccttcgccaacataaaaaacggcatgagattcattcctttttttttttttgagacggagtctcgctctgtcacccaggctggagtgcagtggcgcgatctcggcaaactgcaagctccgcctctcgggttcacgctcttctcctgcctcagcctcctgagtagctgggactacaggcgcccgccaccacgcccacctaattttttgtattttttttttagtagagacggggtttcgccgttttagccaggatggtctcgatctgctgactttgtgatctgcccgcctcggcctcccaaagtgctgggattacaggcgtgagccaccatgcccggcagagattcatgccttttaagatggttctttaggacattagcctgccatcttctcgctttgctggctctctgaaataaagttccttgccctaacaccttacctcttgacttactggctgttgtgcagtgagcagtataagctctggactcagatacataagcctcttgacccctctacttatttagaggatatagaggggtcagagaacatatttaagcaaatctcagggatggcatcagcaaaaaatagaatggaagatgtttcttcagcaaataaggggttaagaacacaaagaaagatgaagacaaaacttagagacttgcgaaaacttaaaaagacttgaaattggagaaaaaataaaaggaaggaacttattaccattaaaatcagaatagtggttacacttagcaggaggaaggagattgtgactggttgcagacatgtggaggacttcagaatcaactagaaactctctccttgtttagaaatactgcttggagggtataaaataatcttgtatgtcattattataacctttctgtaactctaaaattatattaaaataaaaaaaaatttttaagttttaactcctgacacggctgtggtgacatgattgtttaacttgtaagactcagtaagctactcatgtgttatatgttgttctctgaatctgtctaatgtttttaaaaatgccttgaaaacaattacatcattggttctaatccttcttattcccaaaaattcaaattcaacaatacctcatgtgatctgactacgcctaacaatgtgacctcatttctcgtcactctcctcttaggatctctattctggtctactttggtgctcctcaaactcacatagctctctctattaccctcccttgactatccatactccttccctccaatgcttcagccatctccttagccttctaagctctttattcagcttggaatattcttccccagataaacacatggcttgtgaccttataccatgtctctttccaaatactactgccccaaagaagctgtccccagccatctcatccaaaatggcctaacctctgcttactttctaccattgcttattccactgcctaatagtagttgtttgcctgcttattttattttatttatttatttattttttgagatggagtctctctcagtcgcccaggctggagtgcagtggcgcaatctcagctcacggcaagctccgcctcccgggttcatgccattctcctgcctcagcctcctgagtagctgggactacaggcgcccgccactatgccctgttaatttttttgtatttttagtagagacggggtttcaccgtgttagccaggatggtctcgatctcctgacctcgtgatccacccatctcggcctcccaaagtgctgggattacaggcgtgagccgctgcgcccggcctattttattttatttttgagacagagtcttactctgtcgctcaggctggagtgcaatggcgtgatctcggctcactgcaacctctgccacctgggttcaagcgattctcctgcctcagcctcccaaatagctgggattacaggcacctgccaccatgcctggctaatttttgtattttaagtagagacggggtttcaccattcaagaccggccaggctggtcttgaactcctgacctcctgagccacccaccttggcctctcaaagtgttgggattacaggcatgagccactgcgcccagcctacctgtttatttttatgtgttctttagtacaatgtaaatttccatgaggataaggaccttacatgtcttcctcatgatcactacattgatatgtgtgttgtgtgtgtgtgcaaaaggggagctggaaaaacagttgagtccaaaatacaggtaaaatattgcactaaagaaaaacgaggctgggtgtagtggctcacaactgtaatcccagcattttgggaggctgaggcaggcagatcacgaggtcaggagttcaagaccagcctggccaacatggtgaaaccgtgtctctactaaaaatacaaaaattagctgggcacggtggcacacgcctgtaattccagctactcgggaggctgaggcaggagaatcacctgaacccaggaggtggaggttgcaataagcggagatcaagccactgcactctggcccgggcgacagagcaagactctgtctcggaaaaaaaaaaaaaaaaaaaaaaagaaaagaaaaaagaaagccccatcactgaaaacaggtttgaaatataaaagaaataaggtgattggtaaatggggtaaagttgaagcttcttccatagcttatgctacgatctttattcccaaccaggttgtaggcctttgctccacaagtctgggtgccttggaggaaggtttcacaaacaacacaaaaatgtctcctttctcttaccacatgggctgtggccggccctgatggtgtcccctgccttccttacctgtgaactgtgtttcttccctcaaaatcatccagggctcttttcctcgctccagtaaatcaaccacaactggtttagaaatggaatgtcctccttataagaaaagaaatgccacatggtataaaaataaaaacaaaagtaacagaaacctttgagctttgattaaatttacaatgaactaaggacttcaaataaaagaggggtgagatgattgaagaaatgaaacaggcacagtaaaaccttattttaatgtaaactcatacacgcgtggtctcttaggagaaagtttaacctgtgaccttataaaatgtctctttccaaatattaccaccccaaagtagctgtgaagttctctggagccagaaggctggggcacaaattattcctcttaaatctaccaaccttgtgactttggccatgtgacttcaactcattattccaatttggcaaataaactggacataataatactactattggctaggcatggtggctcacgcctataatcccagcattttggaaggccgaggtgggaggatcacttgagaccaggagtttgagaccaacccgggcaacagagcgagacctcatctctacaaaaaaaaaaaaaaaaaaaaaaaattaggcatggtggtgcatctacagtcccaactactaaggaggctgaggcaggaggatcacttgagcccaggaggttgaggctacagtgagctatgattgcactccagcctaagcaacagagcaagatccagtctcgaaaaaaataaataaataaataagataataacaataacactatcacacagttctttcaggattaagttattttatatatatatatatatatatatatatatatatatatatattccccctcccttccaaagagtggctggggacataatgagcacaactgtaccaattataattattttattatttctgtatgagagaaaaaaagcatcccgactgatatataaaatcttcattcaaactcaatgcaaagctcatgaattataactttcaacaataaatcatacaaattggctacaggaaatgaaatgtggactcttcagtttccaataaatattgttcatctaatccagcactatatgtcacaggggttcttcttatactcagagtaaatcatgaatctgcgtcttttgtccctgcaggtggatcagatgatgacacagcatatctataggaattctggaaatatgcacaatgggaaaccaggattcctgggcaatggttattcatggactaataatatataatttaataataataatatataattttaacccagccccttggatattaaggaaaggaggcaatcataaggggcaggagaatatgtgactatctctaaaggatgaagaaaatgatggtgcttagtggcacagccattgtcaaacaggcagagctgaaatattcctctaagaacaggaaggagaaattcaactatgtcttgaaatatggccttgaaattcattgtgttgaaaggtaacatatcacagatcacattttaaattacttgaggcaaataaacttacccagtgataccaggtttctatagttctccaacatcacatccctgtataagtccctctgattagggtccaggtattcccactcctgccgagagaagtctatggccacatccctgaatgtcactaattcctgaaactgcaaacccatgcattacaaaattttaaaaacattttaaagaaggaaagataggagattacaagagcacattagagaaaaggagtgatatagtatatgtggctaatgactggtagcagactaaagcaacgtgtctacatattcctaaaggatcctattgccacaggatcctattcctaaaggatcctattcctaaaggatcctattgccacagacaaatgtttctgcatgttgaaggttaccacaataattcagacctgctgaggaatggataaaataaaattcaataaagtattaaagacacaactacatagtctgctagtcatgtgatgcataaattcccaataaacatgagtttctaaactatttttcctgtaagttagaaaaatgagatgtccttgccaaatttaataatctccaatatttaattgttttgtgctatttatttatttttttggggacggggtctcactcctgcccaggctggagtgcagtgactcaaacatggctcattgtatccttgacctcccaggcccaggtgattttcccatctcagcctttcaagtagttggtactacaggtgtgcaggacctgcccagctaatttttgtattttttgtagagacagggtttcaccatgttgcccaggctggtttcaaactcctgggctcaagcaatccgcctgcctcagcctcccaaagtgctgggattacaggcgtgagccactgcacctggccaatctccatatttaaaaaaaaaagcttttgcagaacatttagacatttccacaagtctcaagttacatcattatgtcagagcacataagcatttttcttaattttgacaaatatattttttattgactgtgcaacaattttataatgaatatttcagacttactccgtcgttaatccatcttttacctcgtgtacattttttaaatcttttttttttttttgagacaggctcactctgttgcccaggctggagtgcagtgacacaatcactgctcactgcagccttgacctcccacgctcaagcaatcctcctgccatagcctcccgagtaactgggactacaggggcaagtcaccatgcccagatgatttttgtactttttttgtagagatgggtgtctcactttttttgcaaggggtctcaaactcctggcctcaagtgatcctcccgccttggcctcccacagtgctgggattacaggtatgagccaccgtagctagcctaccttcatatactttgttggacagaacttcaaaggtcttccccagttctggaaatcaacatatttactccttaggataatattctcattcatcgccattttccatcacttaatacttttcttgttccagaatggatactgatataggatgactcataataaaaaaatgtcacccaagttcagcagaacacattcaaccacaaaataaaaacttgtctctcagtaattctttgacaagatccatggtatatctccaacaattctaaaattctcaaagaatatgagatctcatcacatactaagacagaccaattgataaccaaatcccatcttatttgcctagaaaactcaggtctgcggagaatgtcagagcctacctatggtatccaaataggaccaacatctctaattcaccaaactaaggacctataaaggaagctcaaatagttccctgttgagacttcactcctttactgctctatcatagactttggttgaacaataagcacatgagtactaaatacatttgacaataaatataaaagtggacagaaaatactcatagggagaaaactgagttatttgctatcactattcacaatattagaagaaagtggggacagataactgaaggaggccttcttaaataggaagccttaggttaatgaaaacatccacataacctatgatcatgatattgcaaggaaacagaattaatcaacttacacaggtcatggttttagaattgtaagacctgatcagtcctacttggtggggttccaatactggaaacattcaaactccagagaatccagagctgagagaagaaaagagatgttagtgttcccaatatgacttaatttaataaaatctttctgctcctctatttctccttccaaattaatccctcacaactgaacatataacttagggaaaaacagacaatgaatctaagcactccctcacaccccaggaaacccagctatacaaaggtagttttagagtaagtcaatggctcactaaagccagatccagacaagatagcaagaggttttctggacaaggctccaatttgggaaggctgatctagacttgagattaggctgctcagtttctccatgagaagattcacttgccttcattcccaccttccaaggctgagagaggacttatcgttcaaactagaagcttctttttttttttttttttttttttttttctgagatggagactcgctctgttgcccaggctggagtgcagtggtgagatcttggctcgctgcaacctctgccacccaggttcaagcgattctcctgtctcagccacccaagtagctgggactacaggtgcgtaccaccacacctagctaattttttttgtatttttagtagagacggggtttcactatgttggcggggctggtcttgaactcctggcctcaggtgattcacccgccttggcctcccaaactagtcagattacaggcatgtgctaccgcgcctggcctcaaactagaacctcttctatggcatcagaatcagttgaaattggtcaaaacatgagagagaacacatcacaggaggaaatgtttaggcctggttctgtgttgagcacaaactgccttgctaaatacaaaatatacatgtaatagaataccaagaagctatcagatgctaagtagggaaacgtatttaataaaatttaaaaatttcagatatactgtcaacggaaaattaagatgagaaaacagaatgtacaatatcattggatcgttaaaaagacagacaagcattgaggcacaggctataggacatcaatacattgagaaagtctggtagtttatttattctgttacattacaacatgatcatatgttaccattacttttcttttagttgctatcttgattttcttttttgaatatatttcataatcattttaacactgttcatacattaacttaaaaaatacatgtgtacacacacacatacactcacacacaaatttgtatattaaaaggtgggtttattttgccacttagccacagtgtcatccagtctactgctaaactctctctcttttttttttttttttttaaggggcagggggtcttgctctgtcacccaggctggagtacagtggtgtgatcatagctcactgcaaactcaggcttctgggttcaagtaatcctactgcctcagcctcctgagtggctgggactaaaggtgtgcaccaccatgcctggctaatttaaaaaaatttttttagagacagggtcttactatgttacctaggctggtctcaaactcctgggctcaagagatcctccctcctaggcctcccaaagtgttgggattacaggcatgagctaccacgcctggcctagtttcactttttatctaacatcacttgaagaaaaaattagacagtaaaagcttacagaatatattcactaacttccatatagattccatgagcttagttacaatgatgaccagaatctaatcaatgccacgtccacatgaattcccaaggcacatcacctgaatctctctagtggtcttcactatacactgacttacccgttcctatttacaacttatggcccttgctgaattattggcattttaaagtagtgactagtcctagccacagcaaccagacaagagaaagaaaaaaaggcatccaaattgattaagaggaagtcaaacttgctgttcgccgatgatataatcatatacctagaaaaccctaaagacttacccaaaaagcccctagatctgacaaataaattcagtaaagtttcaagatacaaaattaatgtacacaaatcagtagcattgctatataccaacatcggctaagctgagaatcaaatcaagaactcaacctcttttacaacagctgcaaaaaaaaaaaaaaaaccacaaaagaaaacaaaaacaaaacaaaacaaaacaaaaacaaacaaacttaggaatatacctaatcaaggaggtgaaagatctctacaaggaaaactacaaaacactgctgaaggaaatcatagatgacacaaacagatggaagcacatcccccgctcatggataggtagaatcagtatggcgaaaatgaccatactgccaaaagcgatctataaattcaatgcaatttccatcaaaataccatcaccattcttcacagaattagaaaaaacaatcctaaaatgcatatggaacaaaaaaagagcccgcatggtcaaagcaagactaagcaaaaagaacaaatctggagacataacattccctgacttcaaactatactacaagacaatcgttaccaaaacagcatgggactggtataaaaacaggcatgtagaccaatggaagagaatagagaacccagaataaagccaaatacttacagccaactgatcttcgacaaagtaaacaaaaacataaagtggggaaaagacacactattcaaaaaatggtactgggataattggcaagccacgtgtagaagaatgaaactggagcttcatctctcaccttagagaaaaatcaactcaagatggatcaaagacttaaatctaagacctgaaaccataaaaattctagaagataacattggaaaaactcttctacacattggcttaggcaaagagttcatgaccaagaacccaaaagcaaatgcaacacaagtaaagataaatagatgggacttaattaaactaaaaagcttctgcacagcaaaagaaataatcagcagagtaaacagacaacccacaggataggaaaaagtattcacaaactgtacatccaacagaggactgacatccagaatctacaaggaactcaaacaaatcagcaagaaaaaaacaaataatcccatcaaaaagtaggctaaggatatgaatagacaattctcaaaagaagatatacaaatggtcaacaaacatatgaaaaaatgctcaacatcactaatgatcaggaaaatgccaataaaaatcacaatgtgataccaatttgctccctaagaatgaccataattttaaaaaatcaaaagataatagatgttgccatggttgtggtgaagagagaacacttctacactactggtgggaacaaaaactagtacaaccactatgacaaacagtatgaagattccttaaaaaactaaaagtagaactaccatttgatccagcaatcccactaatgggtatctacccagaggaaaagaagtcattatataaaattattttatttttttttcagtgatagagacaggagtctcaccatgttggccaggctggtctcgaactcctggccttaagtgatctgctggcctcagcctcccaaaatgctgggattacaggtgtgagccactgcacccagacagaagtaattatatgaaaaagacacttgcacacacgtttatagcagcacaattgcaaaaatatggcaacagcctaaatgcccatcaacaagtggataaagaaaatttggtgtacgtacacatatatatacactatggaatactactcagccataaaaaggaatgaaataacagcattggatgcaacctgaatggagttggagaccattattctaagtgaagtaactcaggaatggaaaaccaaacattacatgttctcatttatgagtggaagctaagctatgaggatgcaaagacataataatgatataatggatctcaggaggctgaggcaggggaattgcttgaactcaggaggcagaggttgcagtgaaccgagactgcgccactgcactccagcctggccatagagcaagcctttgtcataaaaaaaaaaaaaaaagccggtcgtggtggctcatgcttgtaatcccagcactttgggaggccgaggcgggcagatcacgaggtcaggagactgagaccacggtgaaacccagtctctaataaaaatacaaaaaattagccgggcgtggtggcgggcgcctgtagtcccagctactcggagaggctgaggcaggagaatggcctgaacccgggaggcagagcttgcaagtgagccgagatcgcaccactgcactccagcctgggcgacagagcgagactctgtctcaaaaaaaaaaaaaaaaaaaaagtaatatttaagaggtggtctcttgaagtaactaatacaaattctgttgttagtcttttaggatatgactttcagatttaagctctgatacttaataaaatgtgtcttaaagtctcattggtaaattgggagaaaatgtcatttagcatataaaatagtctgaagatgaagtaaaataatccacataaggctgggtgcggtggctcacgcctgtaatcccagcactttgggaggccgaggcgggtggatcatgaggtcaggagttcgagaccagcctggccaagatggtgggattacaagcatgcaccatcacgccagactaatttttgtatttttagtagtgatggggtttcgtcatgttggccaggctggtctcgaactcctgacctcaagtgatccgtccgccttggcctcctaaaatggtgcgattacaggcgtgagccaccacacccggccaaatatgagaacgttaatgagattcagctcaatggctcccaacatctactggaaagaaagcagattggtattaggacattcagacacatttcagatgaagtaaaacatactctaaaaccagtaaccttaggaaagaaaaaagccaactagcctaaacattgagttttagatgtgaaagaatttttttcctcctcattagagtccttttgaggaatagcaggaccagggagggagaaaaaaatcatgagttatcaggcctttccttgaagcacggaatgcctccttacacaataccctccacgccttccctgttcacacactttaacacatggaggtaggagagaggctggaatctgggtatgagttcacagcaggttcctggggtcagagctctgggaaagacgaggttctgagacaggtagctcgctctcagagctcacaaagaaataacctcccaggcgtttccaatctcacagcaagtcaatgccttcttgctggaaaacttgatgtagagttcagtatccaacttccctcttgcagacattttttgtgtgtgtcagccgcaagcagctgtgaggagggaggagagaagcagcagccgggaacctacagccaagactcaaagtgacaccgcagtgccaccgcaatcaacgtacatgaaaaggacaagcacctcatatccccgtcacgcaagcacagccactcactcacctgtcacagcctcacaaccgcacccaccgtcaaggaggcacatcccagcctctcacacgcagtttctctgtcacacactctcaaacattccccatctgacatatacaacattctctcacgtgcgcactcaaataccctcctctgctgttcatgcacccacgggcctgagattccgataacaactggccgtccacactagaggcttccacggttaaagggcttcctccaccaccccggctggtttaggttgggctccaacgtaacttgattgcccagagccctccctgcgagtactctgtgcctgttatatactgaaatgagttcaacccaccttgcaaaagaaccacgcgaaaacggaagggaagccatagattgggtgttcccgttgccctctgggaaatgtagtttaagcctaaagctccatgaccgcggtggcttgtgggaaaagtggctcggaaccccaaatcccggttagattgcaggcaccgccggacgctggctcccggaggttttagttttccctctaccaggagtgtgaagacacagagacttattgcgctggcgaagatggctgaggcgaaggcgtgtccgacttgtcctcggagttctgagggtttcagtgaccccagaaggctgagaagtggaatccgaactcgaggctgcccgaagcctcgggctgtttgagtgtagagccggtaggggagggctttcaaagtgtggccgcgagggcgagcgtgggggatcggttatgagctcccgagggcggggactctgctctgtgtcccctgaggaagtccagtcttgttataaggtatgagaaaagtaactttttaaaaatggacaaataataattgtatgttttatatactgatagggtacaatatgctgttttgatctatgtttacaatgcgaaatgattaaatcaagctaattaaatccatcacctcacttttttgtggtgaaaacatttaaaatctacttttagcaattttgaaacatgcaacacattatttatgtagttgctattctatgcaatcgattaacaaagtttatttctcctgactaactgaaattttgtactgttttaattaacatctcccttttccccatttttcagtctctggtaaacaccattctttgcctcttaagagttagacttttttagattccacaaataccacttatgtggtatttggtatttatctttctgttactggcttctctcacttagcataatgtcctcctggtttatccatgttgtcacagatgacagaattttccttgttttatttttattttttatttattttttaaaaatctatttacttattattattttttgaaacggagtttcgctcttgtcacccaggctggagtgcagtggcacagtctcagctcactgcaacctctgcctcccctgttcaagcgattcttgtgtctcagcctcccaagtagctgggattataggcatgcgccaccacgtcggctaatttttgtatttttagcagtgacagggtttcaccatgttgatctggctggtctcgaactcctgacctcaggtgatccacccaccttggcctcacaaaatgctgcatttacaggcgcgagccactgtgcccggccgattttcctcttcttaaaaagtgaatagtattcctttatatatacatatatatatgtgtataaggttatatacataatatatataatatgtaacattttctttatccacttataacatgctggacacctaggttgcttccgtatccaatgcagaataatgctgcagtgaatggtagtgcagttatctcttcagcatgctgatttcaattcctttagctatacacccaccggtggggttgctggaacatatagtaattctatttttagtttctgatgaatctccatattattttccatcatggctgtattaatttacattgggaaatgtacgtacttttgatgttgttgtgaatggactggtttattcaataaattgtgttaggtacattgactaatagtgtgtagaagtaaagttatatttacttaattcttaaaggtatagtcaaaacagactgaataattaaatgtaaaaatgatctggagaaaacctttttttttttttttgagatggagtctcgctctgttgcccaggctggagtgcagtggcgcgatctcggctcactgcaatctctgtctcccgggttcaagtgcttctcctgcctcccgggttcaagtgcttctcctgcctcagcctcccaagtagctgggattacaggcatgtgccaccacacctggctaattgtatatgttttaaaaaattaacttaggaatagattttctaagctaaattgaagggaaatgctaaggaaatagtgagattttacttgataattatgtgtctgaatgaatcagccaattaataaaattaaaacagacctcgggccatggtgcatgcctgtcatcccagtactttgtgaggccaagacagagatcgcttgagtccaggagtttgagcccagcctgagcaacacatcaaaacgctgtctctacaaaaaaatacaaaaattagccaggcggggtggctcatgcctgtagtccccactacttgggaggctgaggcaggaggatcacctgagcctggagaagtcgaggctgcagtgagctgtgatcgtgtcactgcacttctagcctgggcgacagagtgagaccctgttccagagaaactaaaataaagtgaaatgaaaacaaatacaagacaaaaattgatcgacttattttaacacatagtatgatgagagacatagataacagtactaacccggtgtgtttctgttgatcaaagtcacggtcactagtctaaaggaaataggaatagtgactataaattcacaaccatttacaacattagaaatactaattatcttcagatatatcagactcacaattacttgcccttttaagaattcatcctgttctccataaggaagaaagtattgataactctttttttcccttaacttagcactttgtgcttctgaatctctgaatttgtgttcacatcttaacacttttttttttttgcaattattttctgtagctttttgtcttcagttgagacatctcctatattctctttacacttttccacaaatgacccaatttttttgtaagcatcattgatgagttccatgtatgtgatgacggtgtaatgataaattatcaatgtggtttccctccagtcttgttcattattcaagtgactctccttggctgagcaacaggccaggaggtatctatgacattttgttcaggttaagcagtaagaataaaacaaaatcgacattatctttttcatattttaaacacaagccaacaaataatttggaaggacccatgattagacaatgaggattttatgctccctcaagagtaattgagattgtttaattgtatggaggaatgaacatatcttaaagggaagcaagaagatataatatttagatcacagaatcattaggaagcggctttgcaccctggctacaccactgtacacaggaaatatcagggcaccgtggcgcacgcctgtaatcccagcactttgggaggctgaggcaggtggatcacctgaggtcaggagtttaagaccagcctgactaacatggtgaaaccccatctctactaaatacaaaaaaatagccgggtgtgttggcgcacgcctgtaactccagctactcgggaggctgaggcaggagaatcgcttgaacctgggaggcagaggttgcagtgagctgagatggcgccattgcactccagcctgggcaacaagagcgaaactctgtctcaaaaaaaaaaaaaaaatcactgccacaaactttttcacataggacgatgaaggattccagagccccttctacctctaggggctcctaccgctgccatcctacccctgccgtaccacacatatatcttgacagggcctgttacagagaagaaaaggtccagtaaattaatactacagtcattgacacataaccaccaaaaaactcaaattaaaattttgacaaaattaagtgtcagcaagaatgcaaagatttgggaattatcagacattgtaagactgtcagttggtgtgttaacattgggatgaagccaataatacctagtaaaactgaagatatgtttaccatgtaacctatggttttacctcttgctttatactgtacataaatacacactaatggtaaccaaatagaaatacaaaaatgttcacaacggcatcatttgtaactgaaaaaatgaacacaacccacatgtccaccaaccatgaagggatacacactggtgtactgttttttgtttgtttgtttgttttttgagacacagtctcactctgttgcccaggctggagtgcagtggcacgatctgggctcactgcaacctccacgtcccaggttcaagtgattctcctgcctcagcctgccgagtagctgggattaccggtgtgcaccactactttcggctaacttttggttttttgtttctttgtttgctttgagacggagtctcactgtgtcgcccaggctggagtgcaatggtgtgatcttggctcgctgcaacctctgcctcccgggttcaagcgattctcctgcctcagcctcccgagtacctgggactataggtgcgtgccaccacacctggctaattttttgtatttttaatagagacagggtttcactgtgttagccaggatggtcttgatctcctgacctcatgatccgcctgcctcagcctcccaaagtgctgggattacaggcatgagccaccacacctagctggtgtactgttttaatggaatgcagaatcgatgctaaatgtgaatattaaatacttaatattgagtaatagaagccagatgcagcaggatacagactattactccaattatgtaagagagaaaccaggcaaaatcagactatactttaggcatataaaaaatacataataaggctgggattcatgctaaatgagtagattttagcttcccttgccacacgcaaacaatgtgggtatctgtgagatgatagagatgttaatttgcttcactatagtaacccctttatactatgtatatgtatcctataacatcatgttgtgtaccttaaatatatagaataaaatacatttaaaaaaagaaaaagttttggctgggtgtggtggcccatgcctgtaatcccagcactttgggaggctgaggcatgaggattgcttgagcccaggagttcaggaacagcctgggcaacatagtgagaccccatcgctatcaaaaaagaaaaagaggccaggcgtgatggctcatgcctataatcccagcacttcaagaggccgaggcaggcggatcacgaggtcaggtgttcgagaccagcctggccaacatggtgaaacctcatctttactgaagatacaaaaaattagccagggatggtggcgcacatctgtaataccagctatttgggaggctgaggcaggagaactgcttgaacccaggaagcagtggttgcagtgagccgagattgcgtcattgcaccccagcctgggcaacagggcaagactccgtctcgaaaaaagaaaaaagaaaaagaaaacaaaattatgaaaagatgcacaacaaaattaaaatgttgactctaaagagctactgaatgacgggggtgcatgagagaaaaggttacttaacatttttatacctattgaattgaatcctatgtatgcattataaatttaaatgtgcaataatgcagataactgaaatgtgggtatgctttgattaggactttgcatttcccatttgctcaacttccttatgattctagatgcatatgaatagaaatacaaaatttaaggagccacaggactcttatagccctttcttctttccatattttgtgtctctggctgtagtttgccatatgtgtccctatggctaatgagcaaaatatttttcagttggatacctgtgaccaagcattgcaagttaaagatatttctgaatcttggaccctcttagttacagtaaagcccggccatgcataataaagcagagaggaatgtaaaaggttgctgcatcgataatcaatttctggtgagcaataattataggtaatgtaaaatgagacaattattgcttttcatcatatcttgaaagaactcctacagtcattgattttgaacaaaacaccaaagttcactctcctcttttctataatgaaaagacattatccagtagaagttcaagagtaaaatctgaaggcagcttatctgacctggccacatggccttgccacttattcaacataactttctacacactaacctctccagacctcagatcttcaactctctgaaatacaaacatagtagtatctacctctagaactgcagctgaactgagcattttagggaaggaacaaacacacatgatatagatagtcagattatgaacccagcgtagcccagaatacagaaatttctcagtaatagagaccctcaggagaaaaatcagatgtagcctatctcagtggtctttcatgtggcaaatgaaaagtgaaagtccataatgagaaagacatgggcagccaatgataccatcgattcagtgtagactctcaacatatctgacagtcattgcctgttgtaccccaacccgtttatattttgggtttatatcacctttcagttaaaacatacataaacctgaagcctcagtcagaaatatttatggataaccaggtattattctgtgtttccagtcaaaactcaggtagaccacattttatgtgacaggagaaggcacagttgatgcccaattaaccctaagatcatctctgcctgcagcttcctatcatcacagcaagctcttttcctgcagtccatcatctgtgtctgccctttgctatataggtagcaaaaataggcatctgaaaagatgctcaacaccatatgtcactagggaattcaaattaaaacaacgatgagataccactacacatgtattagactggctcaaatccaaacgctaacaccaccaaatgctggtgaggatatggagcaacaggaactctcattgattgctgctgggaatgcaaaatggtacagccactgtggaaggcagttttgcaaattcctgcaaaactaaacatatgcttaccatatgatctggcaattgcattctttggtatatgcccaaatgacttgaaaacatatctactcaaatcctccacatgaatgtttacagcagcttatacataaccaacaaagattggaagtaaccaagatatcctacaatagggaaatgcataaactaactctgaaacaatcatacaatggaatattattcaggaataaaaaaaaatgaactaccaaggcatggaaagacatggaggaatcttaaacacgtatttctaaatgaagccaatgcaaaagggccacatagtgtagagttccaattatatggaatactagaaaaggcaaaactaggcagatggtataaaaagttcagtggttgccagaggcttgagcagagggaaggatgaataggtggagcacagaagatttttagggttctgaaacttttctgtgtgaccctatgatggtggacatatgtccttatgcatttgtcaaagcccataaatggtacaacacaaagagtgaatcttaatataagccgtgaacttaataatatccatattggctcatcaaggataacaaatgtaccatactaacaagatgataatagaggaagtgtgtgtactatggtgtgagggggatattagagctcaatatgccctctgctctgttttctgtacacctacaactgttctaaaaattaagtcaattatttatctatcttttgcagacaaggtctcgctctgtcactcaggctggagtgcagtggtacaatcacggctcactgcagccccaacctccagggctcaagcaatcctccccacctcagcctcctgagtagctgggaccaccagcgtgtgccaccatgcacggcacatttcgtaggcatctgaaaagatgctcaacaccatatgtcactagggaattcaaattaaatttatgatgagataccattacacatctattagactggcttgaatccaaacaccaacaacaccaaatgctggtgaacatacggagcgacaggaattctcatctattgctgctgggaatgcaaaatggtacagccactgtggaaggcagttttgcaagttcctgccagactaaacataagcttaccatactatccggcaaaaaaaaataaaaatttaaaatatgttttatatacttaacaatatataaagaaatatatattttctatatattttaaaaataattgttttaaattttttgtagagacagggtctccctatgttgcccagcctgcagaatctattaatttaaaaaacgttttaaactcttgaacaaggaattatttgaagagtgaaaaataaaatgatagaatattgattgataaattccaaatgttgaatattaaataatttggattaattttaaattccgaaaagcaaaactttaaaaaatatttttaaaatgtcctaatcccatgtcaatgcatgttcaacaaattcaagagccaatttcagagaagaaataagtggtcaacaacaagttcttaggttttgactttatttgttgactatttgtatttgtgaatggcgaagtttagattttgtttctttcttcttagggtattgactaataattttattaagccagagagacagtaaatagaattattatctatttgtccattttatctgttataaatatttcttccaaactcacttatctaaagttttcgggttttttagctggcgcagtggctcatgcctgtaatcccagcactttaggaggctgaggcaggaggatcacttgaggtcagcagttcaagaccagcctgggcaacatggaaaaactctgtacctactaaacatacaaaaattagccgggctgccaggcacagtggctcatacctgtaatcccagcaatttgggaggccgaggcaggcagatcacctgaggtcgggagttagagaccagcctgaccaacatggagcaacctggtctctgctaaaaatacaaaatttttggccgggcgcggtggctcacgcctgtgatcccagcactttgggaggccgaggcgggcggatcacgaggtgaggagatcaagaccatcctggttaacacagtgaaaccccgtctctactaaaaatacaaaaaattagctgggcatgatggcgggcgcctgtagttccagctactcgggaggctgaggcaagagaatggcctgaacctgggaggcggagcttgcagttagcggagattgcgccactgcactccagcctgggctacagagcgagactcggtctcaaaaaaaaaaaaaaaaaaaaaaaaaaaattatccaggcgtggtggcgcatgcctgtaatcccagctacttgggaggcagaggcaggagaatagcttgaaccccggaggcagaggttgcggtaaactgagattgcgccattgcactccagcctgggaagcaagagcgcaactctgtctcaaaaaaaaaaaaaaaaaaaaaaaagccgggcacggtggcgcatgcctgtagtcccagctactcgggaggctgaggcaggagaatcccttgagcccaggaggcggaggttgcatgagctgagatcgcaccactgcacttcagcctgggaagtaaaaaggtttttttcgttttgttttgtttaaactgttttttttttttaccattcagatatatggaatgtttatagatatctaccaagataaataattaccatatcaaggttctaaattttaaaaaatattttttccctttgttacgtttaggaagcctattccaggccgggggctgtggctcacgcctacaatacctgcattttgggaggctgaggccgggggatgatgaggtcaagagatcaagactatcgtggtcaacatggtgaaaccccgtctctactaaaaatacaaaaattagctgggcgtggtggcgcgcgcctgtagtcccagctactcgggaggctgaggctggagaatggcttgaaccagggagtcgcaggttgcagtgagccgagatcacgccactgcaccctagcctggcgacagagggagactccgtgtcaaaaaaaaaaaaaaaaaaaaaaaagaagaagaagaagaagaagatggccgggtgcggtggctcacgcctgtaatcctagcactttgggaggccgaggtgggcggatcatgaggtcaggagatcgagaccatcctgcctaacatgatgaaaccctgtctctactaaaaataccagaaaaaaaaaaaaaattagccaggcgtggtggcgggcgcctgtaatcccagctactcgggaggctgaggcagaagaatggcgtgaacccgggaggcagaacccgggaggcagaggttgcagtgagctgagatcgcgccactgcactccagcctgggcaacaaagcgagactccataaaaaaaaaaaaaatcctattccaggccagccgggcacggtggctcacgcctgtaatcccagcactttcggaggccgaggtgggcggatcacctgaggtcaggagttcgagaccagcctggccaacatggtgaaaccccatctctactaaaaatacaaaaattagccaggtgtggtggcggatgcctgtaatcccggctacttggaaggctgaagcacgagaatcacttgaactcgggaggcagaggttgcagtgagccgagatcgcgccattgcactccagcctgtggaacagagtgagactccgtccctaaaacaaacaaacaagcaaacaagcctattccaaaacaaaaataatgaaagtatttatttctttggatgtttttaaataaaatttttaatcatatgtattcgtgtccaaaggtgaagaacataatgtattgaagaatgtggtgggacttaagtcactcctataggacctgagtccatttacctaacccttttcttttacccgagtcaggttccacccagactcgcctcctactggcgctgagaacgcagcgactccacccttagcctcaggtcgggggccccagcatttgtctgatctgcgcttgcgtactcctaggccaggtggccactcccagaggtgtcccaggctcgcgcggtgggcggggcgcgcggtcctcgtggtcacatccgtatttcctgtaggtttttaggactctggactccacttctcagggttgcctgcggtcctgactgttccgtcttggactacatattccacgggcgacggagaaatcttgtacctctggctccgtctcctggacctctgcgctgcccgtgacctggtcccacctgaggaagaaggcggcgcgggtcgctgccggagcttctgcagccccagcccgcagcccgcgcgggaccctgggtggcggtgagagtggagctgcaggaggcactcagagcgcggaggcctcgggcgcgggccggacttgtctcccacctactcaggccttggggtgctggagctgcgaaggaaggggctcatctctagggagacaggtggagaacgtctcctttgtgacgtggagactgagaagggtgcgtgaatgtgttgtgtgaccgggacatagcgtgagtgtcctttgaaagcgtgctttgctataactctgtggtgtcactgacccgtgggtcagggtctcagtttccctgtctcctctcagcctcgtatgactgccacagagaaatgatctaagcgcaaaatcagatactgagccttagatgaagttttccagtgagaagaaacggataggatgggaagcttagagcaggaattcccttaagacggtgtgatagactcttttaaagaaaaaatattcagtctttaacactcgttaaagcatgcaaaggaagactttattcaggatcatcgtgataggtattggaagcacagcagtgagattttgcaatgggtacaagagattgggttcaactccaaattcagcatgaacgagtaggaatttatagtcaaggagcaggttagggatcactggatgacaaaatactaagaggaaatgtctgggataagtaggattctggctaaacgcacctgttgggattctttctgaagagagagacctggatgataagacatcatcgcctgggggatagtggaggatgaagatggggggcagagggttcttgctaaactgacttaaaaggggcctttgttattgttggattttataatgaagtgtacagatgggcccaggggaaggtgtaagagcctgagtaaagtttggtcacgcagggtttgtgtaggattccttcctggaagggttgtacactccgcccccatctcccggttcttggagtttcatttacgtgtttaagaatcacgtggatggtgaaccctgattctgaagtcggtgtctgctgtgttcatggcaggattcggttaggaggaacagcacagcatgctgggctctggatttaaagctgagcacttaagagtgaatttgagattagtcataaatcgccttgaactattggaggaaaaaaaaaaaaaacagaactggcccagaaagcaaggaaggagattgctgactatctggctgctgggaaagatgaacgagctcggatccgtgtggagcacattatccgggaagactacttcgtggaggccatggagatcctggagctgtactgtgatctgctgctggctcggtttggccttatccagtctatgaaggaactagattctggtctggctgaatctgtgtctacattgatctgggctgctcctcgactccagtcagaagtggctgagttgaaaatagttgctgatcagctctgtgccaagtatagcaagtaatatggcaagctatgtaggaccaaccagattggaactgtgaatgacaggctaatgcacaatctgagtgtggaagccccatccaaaatcctggtggagagatacctgattgaaattgcgaagaattacaatgtaccctatgaacctgactctgtggtcatggcagaagctccttctggggtagagacagatcttattgatgttggattcacagatgatgtgaagaaaggaggccctggaagaggagggggtggtgggttcacagcaccagttggtggacctgatggaatggtgccaatgcccatgcctatgcccatgctatctgcaaatactcctttctcatatccactgccaaagggaccatcagatttcaatggactgccaatggggacttaccaggcctttcccaatatttatccatctcagataccagcaactcccccatcatatgaatctgtagatgacattaatgctgataagaatatctcttctgcacagattgttggtcctggacccaagccagaagcctctgcaaagcttccttcctgacctgcggataactatgacaactttgtcctaccagagttgccatctgtgccagacacactaccaactgcatttgctggtgccagcacctcagcatctgaagacattgactttgatgatctttcccagaggtttgaagagctgaaaaagaaaatataggtctcttaaaccaggcaactttcatattctgggagttgagactgagcaatttctccttgtaacaaagaatctccatgaaattccttttcatctgttaaccgtcactgagcacaacactcctcctctgggctctctgcctgctcctccagattctgctgctttccagttctctgttgatcctgagactaacaaccggagactgaggctggagcaactggctcctggcagctgtgcttgtcccttttctgtcagagtgatcccaggtttcctcctggcccgtcccatggtccctccacaggagcataagaggatgggaaagcactatggggagaccaccaaagatggctggacagtgggagagagcacgtcgtgaagcatcccagcctcgtgttgaggttccagacttagaaacaaacccctctgtacagggggattgtggtgagtgagaatcaaggccacggtgtgtgttttcgcactcgaatgcaagtgggagagagaaaatgactcaggacgccattgtaacggttcctggaagctgggccctctcattggcatatacactactcctcgccgcagggcactgtcccaccgggatccagttgcaaagtttgtctcgacagtttaaggcctcgcttagttgtactggattctcagggagtcctctgtggccttttgctctgagtgctgtttcccttgtaccagagggcagcaccatggaaattctgtttttcctgtagcatattgtgttggattgccttactggcagagaaaggacaaattgccattgaagtctagggtgggcttccagctgccttaatagaagtactcaagtcttttgggtagtgagctggaaagcctacaggaaaaaaggggtacctgttttcatttgaaaactttgattcatggaaactttaaaactaatctcagataaatttttggtgcaaatgtggctgtagttgtccactgctttcctggatggatgggactcttatgtcataacttctatactcctttggcccatagctaaggtcatccttccccacaggggtggctttgggattggattatacagcttttgcttctgtgtagtatacctgtacatacctgtttcaggaagcctttctttaatgttttcagttggtttgtattctgtagctcagtagctgctaataaagttaaagatcctggaaaaaaaaaaaaagaatcacggccttcttgaattctgactctaagaacctgcagtgaaggatgactagagatttcacctaccatacttccttctggttatgtgtatgaaattatgcacctgtagccttggagggggaaacagaaacactatttcgaggagtttttggatcgttccgttttggatttctgtagatcaaaagcaataggaatatgaactcagttgtgatgtgttcgtgcaaatgaaggaagtgagccggaaatttaagtgccccaaaataggaattcttagtcattgggtccattgtctgtttttacgggcatacagggcaccacaatccccctgaaactttatatacatgtttgttaatttgcatttttccagggttccatcttccaaattatttagacttgagctttagacctggaatcagagtgttatacctttgaatggttttgcagaaaactaatgatcaagattatgagaatggttaagaaaatcatacaacatccatgggattggacattatactgataataaaatttatgtttataaagaatttgttattagctgcataccagatatcagggaaacaaaaaataataagaatttgtcattaacggaaaaatgactgtgatctaaccttaaacagtattcacagttgtagatcacagttctcaaaaactgtatatgcatcccattttttaaaaatggaagtttccaaaaccttttgcaaggattgtatctaatatgaccattcaattggtttttcagagaagaatagaaggggagaggccacatttattgaacatctaatgtgtacccaaatcatgtggtctgttttctgtatcttttctcatttaatgcgcaaagaccatttccctgttcattaagggaagaatcttaatagtgaaatgtttctaattatgtagaagtggcacagctaaaggctattcaagaggacacatgttacatgacacgttgatactttttaattctagtcctagtacttaggtttcttttcatgacaaaaatgtaccctcttctaaaaagtttaatgctttggaatgtattgatgttctatttgtaatgatggaattaaggcaggctcattgcaaaaatttcattacctaaggaagttatgaagaagaaagaataaccccaaatcccccctgcccagagaaaatcactttacatattttggtgtatgtgtttctaattttcatgtatgaacatttgtgtgtagttttgtcattgcagaagagaattaatagagacacaaagactccaactgttagttcgaaaatggaatctacctcaattgttgctgttaaaccaaaattatggtatggtattgctttggactgagcttctgcactaggctccaacagaccacaccaaaccaaaatgaagtcactcatgctaaatgccacattatcaaactgaaactttaagggagcagataaatctcaaaaaaaacctgtttttcctgaaaacaagagattccagtctaaataattgatgttcaccactcctttcttatttttaatttaaaaaacttttttttaaagacagggtctcactctgtcacccaggttagaatgcagtggagtggttatggctcactgcagcttcaaactcccgggctcaagcgttcctcccgcctcagcctcccaagtagctgggactacagacgtccgtcaccaggcctcagttcttttttctctagttctgttatttgttcccaccttacacaaaacccactgcattgggcaagggctctcattctattttatacaatggaggctgccccgtttgtgaatcccaaataaaagcccatgagatctaaagtcaatttattgtaactttgtcttttgacgtgggtttccatatatctgtgtatcttaggaggatagggaagtaccagggaccacctgaggtgaaaaacaactacgtatttacgccttttagatactaaaaacatcatttaacactcaagacgtcacaaattatgaagtaagatatcctctcagaattaataatttatgctgggctcatgtctgtaaaatcccagcactttgggaggctgaggtgggtagatcgcttgagcccaggagtttgagaccagcctgggcaacatggtgaaaccctgtctctacaaaaaatacaaaaattagctgggcatgggagcgcttgcctatagaacccatataggctgcggggttccgctctccaggagaacgactctcgggtgagagagcagcccacaggcacacaggcagacctgtcctcgaggtcatggagggcatgacttttggggagactcacccgaacaccgtccgggcaggcctgaggctgggatgccacgctgctcctcccggattctgcctgtggtttcatcatcctggtcctaactccgccactcatggcatccggagaccatcccatcaacaccctggagaggtcaagccagagcctcagggtcctcacacccaagcaccggaacggagggctcctgcattgccaagcctcagggactagtttctcaggcaactgtgggactgtactcacttgagcccaggagtctcaggctgcagtgagctgcgacagcaccactgcactcaagcctgggcaacagagtgagcccctgtctcagaaaaaaaagttaaaaatgttcaaaaggtactgagtggtcagaaaaacagaataaatgcctcctatcttgtatctttttgttttgttttttgagatagagtcttgctctgtcgcccattctggagttccatggcatgatctcggctcactgcaacttctgcctcccaggttcaagcgattctcctgcctcagtctctcgagcagcttggattacaggtgtgctccaccacgcccagctaatcattgtatttgtagtggagacggggtttcaccatgttggtcaggctggtctcgaactcctgacctcatgattcgcctgcctcggcctcccaaagtgctgggattacaggcatgagccattgcacccggcccttatcttgtatcttttgacatctcatcattaacatacacctttcttccacaattaaatttagcatcatcatctacaacaaaatgttcctgccccatatactgccactactccactaacataaatgcaaagttcttccaagtgtcataagttcctgtgaccattttcaaagccacgatttatggggaatatcagttattgctctttgtataaataaacaaaggccaaccaaataagaacaaagaggctgggcatagtggctcatgcctgtaatcccagcactttgggaggccgaggcgggtggatcacctgaggtcaggagttcaagatcagcctggccaacatagtgaaaccctatctgtactaaaaatacaaaaattagccgtgcatgaaggtgcacgcctataatcccaactacttggaaagctagggcagaaggagaatcatttgaacctgggagatggaggttgcagtgagcctagatcgtgccactgtgctgtagcctgggccacagattgagactccgtctcaaaaaaaaaaaaaaaagaataaagacaggcttatgcatatagaacttgctacgtagtaagagttctgtttacatttaagttccatttgtttatgttctctgtagattgtggatattaggcctttgttggatacatagttcgtgagtatcttctcccattctgtaggttgtctgtttgctctgttggtagtttgtcttgttgtgttaaagcttttagtttaattaggtatcacttgtctatttttgtctttgctgcttttttggaaactcagccaaaaattccttgccaaggcccgtgttgagaagagtatttcctaggttgtcttccaggatttttatagtttgatgtcttgtatttaaatctttaatccattttgagttaatttttgtatatggtgaaaggtaaggggcccagcttgaatcttctgcatatggctagccagttatcccagcaccatttattgaatagggagtcctttccccattgctcatttttgttgactttgtcgaagatcagatggttgtaggtgtgtggctttatttctgggttctctaacctgttcctttggtctatgtgtctgtttttgtaccagtaccatgctgttttggttactgtagtcttgtagtatagtttgaagctgcatatgtgatgcctatcagcagtggactgaataaagaaaatgtggtacatatacaccacggaatactacacaggcgtaaaaaaaataaatcatgtcctttgcagcaacatgaatgcagctggaggccattatcctaaacgaattaatgcagcatcaggaaaccaaataccctatgttctcacttataagtgggagctaaacattgagtacacatggacacagagatgggaacaacagacactgaggcctgcttgagtgggaagggtggcatgaggctatggatcaaaaaactattgggtactgtggtcactacctgggtgatgatatcatttgtacaccaaaccccagtgatatgcaatttacccatataacaagcctgcacatgtatccgttaaacctaaaaatagaaaaaattaaaaataaataaataaatgaggtataagtctaattgctgaacgttgtgaaatgtaaccaacagagccattgaaaatagagtggccaggcatggtggttaatgaatgtaatcccagcactttgggaggccgaggtgggtggatcacgaggccaggagttcaagaccagcctggccaagatggtgaaaccccatctctactaaaaatacaaaaattagcgggcatggtggcaggcacccgtaatcccagctactcgggaggctgaggcaggagaatcacttgaacccgggaggtggaggttgcagtgagccaagatcgcactctagcctcggtgacagagcaagactccgtcgaaaggaagaaagagagagagagggaaagaaaaagaaaggaaaggaaaggaagaaggaaaggaaggaaagaaagaaaaaaaagagtgagagtaccgtatttggaaagtggtccaggcactggggtgagtgtcagccaagtcatcacctgtgagaacaggaagtcatcaggtaatatatcaagttgatatattgagaaggagcaggatctacctattatataacacagagataatcactcagatatatagattagaaatagtttagaaaatttaaacatttgattattcagggagtagacctgggagcattggagaaataaggtgggggagtagactgcatggaaagctctttcttagtgtatgatttttcaatgatgcacataggtttcttacataacatgtaaaattcaattaaagaagaaacaaagttgtgttctggggtcccaaaggttcagtgattaattagaagaactcacaaaactgagtcaagctgttatactcatggttatagtttattacaacaaaaaggtacagattaaaatcagcagcagaaaaaggtgcatagggcagagttgaggagagaccaagcgcaagcttccagttgtcctctcccagcggcatcatgtggacagtgcttaattcacccagcgatatgtggcagaaagtacagaaaatactccccaacaaaaagcttacctgagccttggtgttgagggttttactggaggttggtcacatggacaagagcacccatttggatgaccttagtttctctgtctccacccttcccaaggtcaagctgacactgcatggtccaaggtccccacaataaatcacattgttaacatggactatataggcaggatattccaaggagttagaggttattttccaggagctgggctagagtcaaacctttctttggagtgtgcggggtttggacaattcaggcctactaagtttccttgactgcacacaagtgatagtgagtatgtaggaaatgagtagtctcatatattgctggtgaaagtatagtgttatataaacctccggaaagaaatcgagtgtgtagtgcgtagacattttatttggtttgtttttgtttttgtctgagacaggtctcactctgtcacttgagctggagtgcactggcgtgatcacaactcactgcagccttgaccacccaggctccagctatccccccacctcagtatcctgagtagctgggtccacaggcacgtgccaccacacccagctaatttttgtgttttttgtacagagggggtttcatcgtgttgcccaggctggtctcaaactcccgggttcaaggaatcccccacctcagctccccaaagtgctaggaatacaggagtgagccactgcgcccaacctgttattttttttgtataaattaaattgtatatgttaggctcggcacggtggctcacgcctgtaattctagcacttttggaggccaaggtgggtgaatcacttgaggtcaggagttcgcgaccagcctggccaacatggtgaaaacccatctccactaaaaagacaaagttagctggacacggtggcagatgcctgtaatcccagctactcgggaggctgaggcaggagaatcgcatgaacccgagaggcgggggttgcagtgagctgagatagcgccactgcacttcagcctgggagacagagcgaaactccatctcaaaaaacaaaaaattgtatatgttattgtatgtatgtgtatatattaaattgtatatacatatatattacattatatacgcatacgtttgtttcctcgtgcaatctgtttcagcagaagtaaaatctcataaagatagaagtaaaagaatatttacagaagcattatttttggttgcaaaagtactttaatatcttaaatgcttatataatggaagataactcttaacaaagaattagttaactttttatctactataaaggtatcttaatatctttatacctgaagtgatatttgtggcaaattgttatatttcaaaaggagaatgctttataattaaagaaaaaagaaagaaacgttatatagtaggcctcccttatctgcaggagacgtgctctaagaccctgtacccagaggctgcagctccagccgccctgtcaagccagcctgccaagctgctcctgctccaaaccagccatgtctccaccaatgctgtgtggcccaaagtttttttatgagaaatctactgatcatcttattgagcatcccttgaatgtgatgagttggtttcttctctcttgctgctttcaggaatctctctgccttggctttcaacagtttgatgtgtcttggaatggatgtctttgagttcatcttaattggagttcattaagcatcttggatgtttacattcatatctttcatcaaatttgggaagttttaggcattaattttaggcattaatttttgaaataatctctctggtcctttctcttttcctactgaaatttctacagagcatatgctggtctgcttgatggtttttgtactttgaatgagcctttcttatttatttgtgtgccttgtgattgttgttgttgttgaaagctagatatttgactccaataatatagtaactctggaaatcaggttcttccttttttggtgtttgtgaatttttttgttttttgatcattgtaggctccctgtgtcatggattacccggagatgtaagcttaaagtcttctcagatcttcttgaagcctgcatccttttctgggcatgcaccgtgactctctaaattccccggtgtgtctggtttttaataaaatctcctaggtcagtagtccccaatctttttggcaccagggactggtttttggaagatagtttttccatgggcccggggagggggtggggtgatatcaggatgagtcaagtgtgtcaaatttattgtgtactttatttctattattattacatagtaatatataatgaaataattattaaactcaccataatgtagaatcagtgggcaccctgagcttgttttcccataactagatggtcccatctgggggtgatgggaaacagtgacagatcatcaggcattagattctcataaggagtgcataacctagaccccccacatgcacagttcacagtagggttcatgctcctatgagaatctaatgccaccgctgatcagacaggaagcagagctcaggcggtcatgtgaacaatggagagcagctggaaatacagatgaagcttcacttgctcgcccgctgctcacctcctgctgtgtggtccagttcctaacaggccacagaccagtactatgggttggggaccccatcctagagtttgaatgtctggcccccagaagggaaaaaagagaaaaacaaagaggaaagaagggaattggatctttaaatcacctggaagtagcttcagctggagcaagaggggcttggaatactggagcagaagggtgcagcaatggcagactgctaatctgtctgcactgccaagatcagaaatagcaatgagaaatcagatacccaagttttggaggacaggttccttgctgcccaccctggctcccttaagctgccagatatgcatggctgcttgccccatggctgggggatgagttgctgcctggagctgaaattagcagaaattaaccacagtttgccatccatgcctttccctggaagttacaagctttgaatatattcaggttccaaaatggtcacataaggtagattctgccagtacaattgttgtctaggtgggatgacacattcctagtgcttcctgctctaccatcttttagaaccctctgtccatataactgtattttagagttctttatatcatatctaatagatgagattatcaattttctcttaattctaccatacaacatttactttttctggtcaaggaaacaaagtgtttttcttatttcttttagatttggattcgaggtatgaaataatcaactacgggaacatgtacatttatagaaaacattcatttcttactctccatcagataattcaatatggagagaaaccctatgaatgtaagcaatgtggaaggcctttggtcgtcatacagaccttagagtacatcaagtaattcacactggtgagaaaccctgtgattgccaggaatgtgggaaggcctgtgattgccaggaatgtgggaagtcatcatacagaccttagaatccacaaaagaattcacactggtgagaaaccctatcaatgtgaagactgtgggacaacctttagtcgtcttacagaccttagagtacatcagagaattcatactggtgagaaaccctatgaatgtgaagaatgtgggaaggccttcagtcgtgccacaaaccttgctcaacatggaagagttcatactggtgagaaatcctatgtgtgtcatgaatgtgggaaggcctttagtgaagttggaagacttaggaaacatcagagaattcatactggtgagaaaccctatgaatgtaaggaatgtgggaaggccttcagtcaagcctcaaacctggcacaacatgacagaattcatactggtgaaaaaccctacaaatgtaaagaatgtgggaacgcctttagtcacacgtcacatcttgttagacgtgaaagaattcatactggtgagaaaccccgtgaatgtaaagagtgtgggaaagcttttaggagtaaccatcaacttactatacatcatagatttcatactggggagaaaccctatgaatgtaaggagtgtgggaaggcttttagtgtgtatggacgactgagtcagcatgagagtattcacagtggtgagagaccctttcaatgtaacaaatgtggaaagtcctttaggctcagttcaagtctcaaagtacatcagagcatgcatactggtgagaaaccctttgaatgtgacaaatgtgggaagtcctttaggtttagttcaatccttcaagtatatcacagaattcataccagtgaaatactttatggcatatacatataatagacaatgcacagtatatgaatgaattataccactgagaaacagttgaatgaagaaaatgtgagaaggcttttatgcatggatcagtttttacaggacgtaaaataatctatactggtatgaactcttttggaatataaatatttgaagtttttaatttatgactcaagtgttcagagtatttatgttgtattttataaaagaaagtattttatggcattcctctatgtttcactgttcaatctgtggccagactgtgcagccaaggttaaaaggcaggtaagtgccacccagggaagagactggtacatggtttgaggttgtggaagacagactacaagcacaccaggctcaagtggttcagcatttacttaaagctagagaggagaaagagtgcataagatcgtgccgcttgcaatgtgtcagtccccctagccagcagttccactgtgcagctgatatggaagacactagcaactgcacacaccccactttgtgctgcagtgacaggacttcatcccttccccgcctcgggtctgaaatacataatgctgggaatgtgcttcaaggccactgacagatgtgcttaagcagaacaaaagagtatacaataagtccaaaacagggaaatacagtcccacacaagtcaataatcccagcacaggctatgagggcttttgaatctcatggtagggaagtgttccaggcccaaggctcagtcttatgtggccatgtgagggctgaaagactgcatgacggcctttcccaacactatttatggattctcagaatatttatactaaaggaatattaagagaacacacaaaaccttgtttatttgttttatgtataaaagctttccagcacaaatcattattaaacttgagtaaattcatatcacagaaaacctctgctaatgtaacagacagacgtaggaaagcgtttagcctttgtatgatcttaaccattctaattgtctttccactccttgttttttctcattcgtatatggcaatactaataatatctacattatagtggctgttagaactaaatcagttcatttatgtggaaaacatgggaaagtttttgacataatagttcatgttcgataaacattagcgactgtttctaataccatttatgttttgagatgaaactcttatgggtctaagaatttaggaacatttcatgtaactgcttaccccttttttaatgtgaattttttctttctgaactactctaatagaatgtaaaaaacctgagagcatcttcattctgaggtcttaaggtgaatcaaacacttaatccttgaatgaaatttatatttatacttttagaaagtgtaaaaaaatgttaaattagccaatgatttacattccacttccacatttcaaaattgattagaaattggccaaaggatatctattttgccatttcccccaaatttatgaaaaattagaaacataaagaaaagctgaaaaacagtacagcaaatatatgttaatattatgtcatatgacctttctgttttgtatattttgctgcatcattggacagttgtaaacatcatgatgtttcagttttaaatatatcaaaatgaatcccccaaagagacagatttctttttttttgctttttttttttaggcggagttttgctcttgttgcccaggctggagtgcaatggcacgatctcggctcacggcaacctctgcctcccgggttcaagcgattctcctgcctcagcctcctgagtagctgagattacaggcatgagccaccatgcctggctaaatttgtatttttagtagagacggggttttgccatgttggtcaggctcgtcttgaactcccaactttaggtgatccacctgcctcagcctcccaaagtgctgggattacaggtatgagccaccgtgcccggccaagagacagatttctaattacataagaaaaataataattttggccgggtgcggtggctcaagcctgtaatcccagcactttgggatgccaaggcaggcagatcacgaggtcaggagatagagaccatcctggctaacacggtgaaaccccgtctctactaaaaatacaaaaaattagctgggtgtggcggcgggcgcctgtagtcccagctacttgggaggctgaggcaggagaatggcgtgaacccgggaggcggagctcgcagcaagccgagatcgcgccactgcactccagcctgggcaacagagcgagactctgtctcaaaaataataataataataatttcatattctaatgcctaacctgtattcaaattttgaaaatttatccaagttatatctttttggtcattttcaaactggtatttgctctagtttatgcctttatgataaagcgttactcacttttaatttagaatagtggctggaaaactatggcctacaggctaattgcaacctgccagtggattttgtagttttattgcaacactaccacattcacttgtttacatgttttcttcttactaccacgtcagagatgtcattgcaatgagaccatttgcaatggtcacaaaacctactgtatataatatcatgacctttctagagaacatttgccaactcatttagaacaatatctctactgttttttttttttcatgagtttggctttttgaagaccacaggaaagttgtctaatagaatgctgaacattctgggttgttttgtgtgtgtgtggttttgttttttcgtttgagacagggtctcgctctgtcacccaggatggagcgccatggtgcaatcacagctaactgcagccttgacctcctggacttaagcaatcctcccacctcagcctcccaaataactgggaccacaggtgtgtgccaccatacctggttaactttatttttttgtggagacagggtctctctatgttgcccatgctggtctggaactactgggctcaggggatcttcccacctcagcctcccaaagtggattacaggcatgagccatcacacccaactgtggattttaaaaattgtttcattgtgaagtcttatttttctttatcttagtcctcatagttctagtatatttgaagttaaaccaagaggtttactaggttatgattaagaattttcagcaagaatatgtcacagatgatgtgcacactaaaaagcgtataatgtttgattttttccaggactaaggatgctaagtgtcatcacttggttatagtggtgattgcttgatctctccagaatagagccccattataaagagccattttacagttattaatctcagggatattgtgtcacatccttttagaaatctataatccttttagaaatctaaaagcaacatccttttagaaatctttagaaatctataatttagaaatctataattaattaaatccttaattaaatatggaattaaaaatggaaatcagggcctcttcagaaagtaataataattaaaggcctgtatattagaacatggggatattgccagacctttttgggaatttaatacccttcaatgcacacaggaaacgaagagtaaaggccagaatttgtgttcaccactctatccccagaacccattcaatacctgttaatgagctggcgttgataaacttgataaaccctaagccaatacaaagcaacagttaatacaacagaagaattagagcctagtgattagtaaacaaaatagtaccgtttcaaacagttttgttcccaccagtgaaaagcaatgaatgcgtctacaagtacatttttattgattgagaagtgaaccattatcttgaacaaaggtgtgccactggtctccaggaccactcaggctcaatgatttgctggaaggactcctgggatccagaagagctgccatactcaaactcaaggcgaaggatgcaggcaacaatgaacaatgggagaaggcactggacaaagtccaggagagacgaggcacaagcttccagttttccccttccattagaattgcatggcaacagcacttaattcttcccaccatggtgtgtgccagcatgtgcaaagtagtgccaaacaggtaatctcgtctgaatgctggtgtccatggtgcctgggtgactgaacttaactcctgaatttactcagtctccagccttccagaagtcaagctcatatagcatgggccttgggcacacaaaatagccattcatcataagtcacattttttgcataaactttgtggtgacagtgatacagcataggaagcacgatagtccaagtactcagagattatctcccaggggccagtgaagggccagtcctcctgaacacaggcttttcattggaatgtataagggttgaacaccacaggcctgctgaggtaaccctttcctgcacagtcaggcagttttgggcattcttatttcagagaacctgattactaaagtacccatgtaataaatgatagatagggaaaaatcttaaggatataaaaaatatttcagaaatattatttttgaaaaaaatcaggttacaagccacatgtagaacatgatattatttgtaaaacatacacatatttcaatataggattcaggccattatatataactagactgaaaaagtctagaatatcatacacccgtatattaacagcgtttatctttttgttttgatcttggggtattttggttaaatatatcataatttttggtcagttgccatgccttacttgaaatatatgtatgtaaacttttgtgtgtgtgttttaagcggaaacctacactctcaaaagcagaacgttcactttttaaaaccatctcggctgggcgcggtggctcacgcctgtaatcccagcactttgggaggccgaggcgggcggatcacgaggtcaggagatcgagaccatcctggctaacacggtgaaaccccatctccactaaaaatacaaaaaattagccgggtgaggtggcaggcgcctgtagtcccagctactcgggaggctgaggcaggaaaatggcgtgaaccctggggagcggagcttgcagtgagccgagatcgcatcactgcactccagcctgggcaacagagcaagactccatctcaaaaaaaaaaaataaaaataaaaataaaaaataaaaaataaaaaataaaaccatctctacttgatcttacagaaaaacaataaatttggattgtttttgctgaattacttgtgtttccttcagtttcctcatagctgaacctcctctaagatttctgtcacatcacctgaatctggatagtggtccttaatacattgattcctagtcagagtttattttactagaataaaagacaccttagcaactatgtcattttagtctaccacctcaaatgctatgattgcaaggtctgttacactataagcacttatacctgtaggcaaattatacttctaggaattcgcttaaggaaatgcaattacgcctcacttagcaacagggatacactctgagaaatgtgtggttaggcaattttgtcactgtgcagacatcacagaatgtacttaaacctttggtatagccgattacacacacatccaggctacatggtatagcctattgctcctaggctacaaacctatacggcatgttactgtagtgaataccgtagccaactgtaacacaatggtatttgtgtgtctaaacatatctaaacagagaaaaggatcagtagaaatatagtatatagccaagtgtgctggtgcacacctgcaatcccagccactctggaggattgcttgagccaggagttcaagttcaggctgggcaacataatgagatcccatctcaaaaaacaaaacagaaaaacacagcctgggtgtggtggctcatgcctgtaatcccagcactttgggaagctgaggcaggggggttgcttgaatgcgggagttcaggaccagcctaggtgacatggcaaaaccccatttctacaaaaaacagaaaaattaaccgggcctggtggcaggcgcccatggtcccagctactcaggaggctgaggtgggagggtcacttgagcccgggaggcagaggctgcagtgggccgagattgtgcccctgcactccagcctgggcaacagagcgagactctgtctcaagagaaaaaaaaaaaaaaagatagtataaaagataaaaaatggtacacctatgtagggcacttatcatgaatgaagcttacaggactggaagttgctctaagtgagccattcagtggtgagtgaacgtgaagacctaaaatatttctatacactactgcagacttcatgtaaacactgtacacttgggctacactaaatttatacaataatgtttttctccaataagaatcttagcctactataacttgcaacttaatttttactttttgacttttgtaataagacagattaaaacacacattatacagctgtataaaaatattttcttttaagtccttattcatatacctttttctatttttaaatctttttttgctttttgaacttttttggtaaaagctgagacacaaacacacaccttatcctaggactgtgtcaggatcatcaatatcactgacttccagctccacatcgcgtcccatggaaggtcttcagtggcaataacacacacagagctgtcatcgtctataacaatgcctctggaatccctcctgaaggacatgcctgaggctattttacacttaactttttcttgtaaattgcaggactacactctaaaataatgataaagagtatagtaaacacataagccagtaacatagttatttattatcaaagtattatatatgtacagtacatattatcaaagtaactatatacttttatacaactggcagcacagtatgttttacaccagcatcaccacaaatgtgatgaatgcattgtgctacgatgttataacagctaccacatcactaggcaacaggaatttttcaggtccattataatcttatgggaccactgccatatatgtgatctgttgttcattgaaacattatagcctatgactgcactagtaaaaatacataaaatgcatgtacaatgatgttcaaaatgtatttttgataaccaaacatttaaaacaaaaatctaacagcaacacattaattacttcggctctgctatatgacaacaaatacaattttttttgttttgttttttgttttttttagatggagtctcactctgtagcccaagctggagtgcagtggcatgatttcggctcactgcaacctgtgcctctggggctcaagtgattctcctgccttagcctcccaagtagctgggactacaggtgcgtgccaccatacccggttaatttttttgtatttttagtagagacgaggttttaccatgttgccctgggtggtcttgaactcctgagctccagtgatccatctgccttggcctcccaaagtgctgggattacaggcgtgagccactgtgtctgtctcaacattgttaatcatattgattttaacctagactaacaaagaaacatatgcaagaagaatcaccgaggaaggcaggtttaaaataataaatttccagctgggcagggtgactgacatctgtaatcctgccactttgtgaggccaaggtgggaggactgcttgagctcaggggttcaataccagccgaggcaatgtagtgagaccctgtctctacaaaaaatgaaaaaattagccagatgtggtggtgcatgcttatgatcccagctactcaggaggctgaggtgggaggactgattgagcccaggagacagagactgcagtgagccgtgactgtgccactgaactccatccagcctgagtgatcaagcaagaccttgtctcagaaaaataaaaatagaaatgatgacaaaatatatttccataatttgaaaattttatgctgttcaaattcagaataatcgggttgtcacagagctcatagagttcatgacatctgttctgtcctaagcagggctggagtcaccccaaaagtggcagcagggaagttctcagaaggaattccatcccaagatggagccagctgggatcctaaagacagaagcactgaaagtccgggcaatcagtgcaaagtgtttactaggggaatttaaatatacagggccgcggcctgagagggataacgagaagagagatgtgccacccatgtaatgtccttaatgaagggattgggtcatggagtttacatgacagttaaaatatttggcccaggatctagtatacgtgtttagcaacatggttaatctttcagtgcatcaagcaacaacctaaaactaaatcagttcttaggaatgtgcaaggccctggtttgggtttaggctcaagctgaaaacatgcagctggtcaggtcatagtggtcaaagcattctgtttcttggtcagaacaaagaaagtgggggcagccagagtctcctacttttttttttttttgagacggagtcttgctctatcacccaggctggagtgcagtggcgccatctcggctcactgcaacctctgcctcccaagttcaagtgattctcctgcctcagcctcccaagtagctgggactacaggcgcctcccaccacgcccagctaacttttttgtatttttagtagagacggggtttcactgtgttagccaggatggtctccatctcctgacctcgtgatccacccacctcggccacccaaagtgctgggaatacaggcgtgagccaccacgcccgtggtgccacctggcactttttctgttgttgtttttttgagacggagtttcactcttgttgcccattcccaggctggagtgcaatggcgcaatctcggctcaccgcaacctccgcctcccgggttcaagttattctcctgcctcagccttctgagtagctgggactacaggcacctaccaccacgtccagctaatttttgtatttttagtagagacagggttttgccatgttggccaggctggtcttgaactcctgacctcaagtgatccacctgcctcagcctcccaaagtgctgggattataggtgtgagccaccacacccagccaaaatattcacattggtttttactgtacaaaggtattatggatgatgtctctcctttatgtttatttccaatttttctcagatattattaatttttataaggaaattactaaagaacaaggatttcttgtcaggtcctgtttttctcttatattgtaagacctaaaatttcatctgttatcttaacacctttgagcctcaccgggtcccaaaggcctaaccatgagtttccctgctctcatcagatatgccccctacccagcaagaaaggctcccagccagttagttccttcgaaggccagaccagctatatcccacctggtcctcaagctaatggagttcatctccctgccagcccatgaaaccaatgaagcaagataatctcattctcccatggaaaccagggggcgcctcatcctcttactattataaaacctgcctctcacagcccctgctgaggtagtctacttccaagtgcaatcttcctgcagaggtgctaactttctttctttgggatatgcatttttatgtgattaataagctgctgtcaatctcatctgtccagtttccaggtgtcatgtgtcagatacctccagaaccatagggcaagactctgtcaccacaagggaaaagaggtgggcaaaacactttccaattcttttttttttttgagatggagtttcactctgttgcccaggctggagtgccaccctgttacccaggctggagtgcagtggcacgatcttggctcactgcaacctctgcctcctgggttcaagtgattctcccgactcagcctcccaagtatctaggattacaggtgcttgccaccacgcccggctaatttttgtatttttagtagttggggtttcaccatgttggccaggctggtctcaaactcctgacctcaattgacccacccacctcggcctcccaaaatgctgggattacaggcatgagccaccacgcctggctccaactcatttttacttccatttcagagctttcagtatccatcgtgcatggttttataaaactcaaacttcaaataaggcactaaatcatgttctcagtctagtttaatgcatggtctgaagttgagctactcaaaataattttggaaaagtgtctgtggctgaaatttcattttgctaagcatacaaacctaaaatgaatattattttagtgttgtcctatttgtaagggagatcaggcaaaaaaattaaaggtgtggaatctctattgagccttgatttacagggaaaaggactgtttgagatgacttttcaggttaagagaaaatggactattagagtaaaaagaattgagtcaaatgaattttgttggttcaggaaacagatactggtgtgaaaatgtaaaatggtacaatcatgatgagaaatttgtcaatgtcacaagttaaaatgcacatagcaaacctacttttgagaattgatataaaaacgtacaaatatgtaaactaatgtttacacaagtatattgtttggagcattgcttttaagaaaacataggggctaggtgcagtggctcctgcctataatcccagcactttgagaggccaagatgagcagatcacttgaggtcaggagtttgagaccagcctggccaacatggtgaaaccccgtctccactaaaaaatacaaaaaaattagcgaagtgtggtggtgcatgcctgtaatcccagctactagaggggctgagtcaggagaatagcttgaacccaggaggcagaggttgcagtgagctgggattgcaacagtgccagcctaagagacagagcaagactatgtttcaaaaagaaagaaagaaagaaagaaaacataggaaattccttaatatacagtaggagaaggcatgtttcttaaactaggatgcagccatactggggcctttggcattgttgaaaatgacattccttacgtactgatttggaactatgtttacatgaagaaaacgaaatatgtacttatatatgtgttgtggaaagtctgggaccctgaacggagggaccagctgaagccacagcagaagaacataaattgtgaagatttcatggacatttatcagttcccaaaattaatacttttataatttcttacgcctgtctttactgcaatctctgaacataaattgtgaagatttcatggacatttattagttccccaaattaatacttttataatttcttatgccatcttactttaatctcttaatcccgtcatctttgtaagctgaggatgtatgacacctcaggaccctgtgacgattgtgttaactgtacaaattgtaaaacgtgtgtttcaacaatatgaaatctgattgtaaaacatgagtgtttgaacaatatgaaatcagtgcaccctgaaaaagaacagaataacagtgattttcagggaacaagggagataaccataaggtctgactgcctgcagggtcaggcagaataaagccatatttttcttcttgcagggagcctataaatggacgtttgagtaggagaaatatcgctgaattcttttcccagcagggaatattaataactgataccctggggaaggaatgcattcctgggggtaggtctatagacggccactctgggaatgtctgtcttatgtggttgagataaggactgaaatatgccctggtctcctacagtaccctaaggcttactaggattgggaaattccagcctagtaaattctagtcagactggttgtctgctctcgaatcctgtttcctgttaagatgtttatcaagacaatgcgtgcatagtgggacacagaccctcatcagtaattctaattttgtccttgccttgtgatcttttattgccctttgaagcatgtgatctttgtgacttactccctgttcgtacatctgctccccttccagaatccctaatagaaacttgctggttttgcggctcaggggcatcacggaacctgccgatatgtgatgtcacccctagaggcctagctgtaaaatttctctctttgtactctttctctttatttctcacaccggctaacacttagggaaaatggaaaagaacctacgttgaaatattgggggctggttcccccgaaataaacgcatgttacatatatgtatatttggaattatatatggatataaatacatttgtatgtgtgtgtatatgtgcatatttttatataaaaataccttctctggaaggatatataccaaaataaaaatgttgactctaaggttagctactgtatgactggactatgtggaaggaaaggctgcttatctttttacttaaaccttttcatacctattgaactgttattctatgtatgtattacatatttaaaatacgtaataatgctgatgactaaaacataggcatcctttgatgagtatgtttcccatttgctcaatgtcctcatgaacataaatacatataaacacaaccttggttcctttttttttttttaagacaaggtctccctctgtcaccaaggttagagtggcactgcagcctcgacttcccaggctcaagccgtcctcccacctcagcctcctgagtagctgggaccacaggttcgaacctttttattttttgcagagtcagggtcttgctatgttgcccatgctggtggcgaactcccaggctcaagcaatcctcccacctccgcctcccaaagtgctggcattacaggcatgagccaccacgcctggctcaattcttctgacagcaccttctacccagattttgggcgtttggccacaatttatcttcactgtcttgggatctcatgaccaggcattaccaatgaaagatgtttctccagtctatgggctttaaaatgcagcaaagcccatccatgcaaaatacaaaaagtattacacaagcgtacagaattgtacattataaacctaccttcaggagtttataccaactcaagcgcgcgttgttactcggggtcacagcactgattctacagggcagtcatcacacacgtctgaggcctcagaagagcgtcgaagtcacctttcagcctaccccagccaggttccactcagactcgcctcctggggccctaagaacacaggaacaccgcccttgacctagcgtcagaaacgttccctcacgggttggccgctctgcgcatgcgcactcctagcccaggctgcaactccccgaagcctccgggactcggcggtgggcgtggcgggcggtcgccgtggtcaccacggcttttctcagaggttttaacgcccctagacttcatttcccgacagggactgcgggtctggatattccgtcgtggactacgtttcccactgacgacggagaaaacttggtcctttggctccgcgctgcgcgtgacctgcagtcacctgagcaagagggcggcgtgggtcgctgcgggagcccctacagccccagcccgcagcccacgtggcaccctacagggctgtgagagtggggctgctggaggcgttcagagcgcggaggccccaggcgcgggccgggctctctcccgcctcctcaggcccgggggtgctggagctgccgaggtgggggctcatctttgggagacaggtggggagtgtgagagaccgcgcagcggcgacagggccgggcgtgcctgtgtgacgtgggtgcagctgtgggactgtgaggggtgcgtggtcgaccttgcgtaacctggatgtgcagtgcgtgtcctttgcaaagcgtgcgttgctgtggctccgtggcgtcagcaacccttccctgctgtttcctttgtcctcctctcagtcaagtatgactgccacagagaaatggtcccatccaggaaatcagatattgagtcctacctgagtttccagcaagaaggtacggacttgctgttaggatgggaattatggatcaggaattgccctgagatggggtcctggtaacagatagactctaggataggattccctcctggggattgcggcagagtgtacttgcaagtggagccttgaagggtaagatcataaatgttctacattgtggtgactctggaatttgtagtatttgggacaatacagttactaaaaagacattattgcgtcctttaaaatgtttattatctgtcagtgaaggtaatatctgaataggattaatatgtgttaggcagtgtgtgatcctacctcgtgaattcgctggaaatacacttcagtctgtctatcacaacaggatatgaacaaattataccaatcctgttgaatctatggcaataaatagattttgtgctgtaactttcgtggctcacagtttccttctaattaggttagatgcaaaatgaaagtattataatagaataaagtaattcggccgggcgtggtggctcacacctgtaatcccaggactttgggaggtggaggcgggcggatcacgaggtcaagagatcgagcccatcctggccaacatggtgaaaccccatctctactaaagatacaaaaattagctgggcgtggtggcgtgcgcccagtccgagtagctgggactactcgggaggctgaggcaggagaatcgcttgaacccaggaggtggagtttgcagtgagccgaggtcccgctactgcactccagcctggcgacagatcgagactccatctcaaaaataaaaataaaacaaaataataataattcagaagctgtctgaggggacatgacttatctgacaggcttagaaacaaaataagcctttttgtccagaagatctgaaataaagctgtgtggtgaccgccatcagtttattcaaaagattactcagggactactccccattttttcaagacagaattctgtcatacctgagaagaaatgatcaagtaagttcagataataggatccaaaggaaacaaaagataagacatttagtataacaacgtaaatgtagagaacaaagacattgtctcaagtccctttcttttgggggaacatcttcctgttaacaacaacaacaacaacaaaaactaaaaaagcccacatgtgtttcaagttaacctattgttattattggaataattatgaacaaggctttaaaaattaaaatcaaggtcaaacaaaaagaaaaatagtgttaataggtggccatataaccttccaagtttttgtttactgatttcagtaatcgtctgcttctctgtattgatagtcatgttttataataatgattatattggccaacctgatttttctattgacagtatatctgaaatatttcctgtgtccttaagtatttttcacagcttcccattttacatgtacgatggtctgccatatctagtaagctttgtcagatccaaaatactaaatgctgcctttctgtccccagtgtctttgctcagttcaaaagccacagaagaagttctggacgatgtgggccttcaatcttctaagatgggaatagaaagaagaggatctacccagaccaggaccctgctgcccaatctcaggtctacatctgcctcaccaaaataatacagtggccagaaacctccctgctaacatcatagtttgtctgtgatgcagaaatgcctctgttttgttgttgttttgtttttgtagagacagggtcttgctctgtcacctaggttggagtgcactggcacaatcatagttcactgcagccttgaactcctggactcaagcgatcctaccgcctcagcctcccaagtagctgggattataggcatgcgccatcatgcctagctgatttttattttgtagagactgggtctcactatgttgcccaggctggccttgaactcttgacctcaagcgatcttcctgcctcagcctccccagttgctgggattacaggcgtgagccatcgtgcctggccccagaaatgcttcgcttctatgactttgttcagtggagacctctgtgatttgggggaggaaatagatttatccagaaccccaatttgcccgaattatgtatgatgggaaatagtttgagacctggaatggaagagcatcacagcaatattaagtaacttaaggtctgtcaggaacactaatgcaaaactggtctcaaggtctttcttcttcctccagctctggctttctggatctgtgcttctctggtagaggaaccctgaggactgatctactcttgcagttctaaaaccatggcccatgtaagttcacgtttttctccttgttgaaatatgtgtgtgttggccaggcacggtggctcaggcctgtcatcccaacactttgggaggccaaggcgggtggatcacctgaggtcaggagtttgacaccagcctggccaacatggtgaaaccctgtctctactaaaaatacaaaaacagcccagcatgatggcagatgcctgtaatcccagctactcaggaggctgaggcaggagaatcgtttgaacctgggaggcagaggttgtagtgagccaagattgtgccactacactccagcctggacaagagcgaaacttggtctcaaaaaaaaaaaaaagaaatatgtgtgtgtttttaggtcatgaaggtatttttattaattttcctgaaatttcctaccaggagaggctcatcaaataacatgcttccagctcttattcttccagttcccagcatccacccaatatgtcccattataaacctcctttgttcatgtaattactgagcaaattattcagcatgtcttaagagccctctatcaagggcagtggtggagttaagtccttttaagtaaagatttgtgctttttgggtcaagtctagtttggtaagatagagtcaatggttgtatttgaccatccataacaaaacttaaattatcaccgactggagatttccaggaagtgaagatgaaaatttggtattgaatgatcaaactcagtcattcattgggtgaaatctcatgctttgtgtggttcagtaaatgactggggacttgcaaacttggaggttatggattttggcaagaaacccctcaggaataaatatcaggactattctgatgttggatggaacctactaaatttagatgacatgtatataattcattattcttccttagtattctttaactcaatgcatttgttatctattattacataacaaattagaccaaaacttaatggcttaagacagcaaacatttatctcacagtttctttggatcagaaatccagacatggcttagcttgcctctctggctctcgatctcttacaaggagatccaggttttggtcaggactacagtcatcttaaggcttaacttggggtggatctttttctaagctcactcaactagttgttaacaggatccagtttctcacaggcttcagactgacagtcttagttcctcattcgctgttgcctggaagctgctcttggtttattgtcatgtgggtctgtccatagaatagcttaaaacatggtggctgtgttttaatcagtgagcaaatgagacatcaagagagggagagaaatacagaaaaagtgctgaagtaacatttcagcactgtagctattctgcttattaagagcaagtcacttggttcagcccacgtgcaagggaaggagattacacaagcatgtaatactatcggatggggatctttggtaacctatatagcaagccaggtgctcagtgagagatggtagagagccacaaaagagaatgtcattataagtagcaagtgaacacagaatcctagaactggggaagaccttaaaaatgttgtgtatcctaactgcattgtaaacaagtaagtctgatattgccctaagatataattctcatgtgcccccaaaatacatggatttgtcaaaacaagagaaaaatgcttatggtgagatctgatgtaatgaagtatttaatgcttgagagaattcttaattttatgtaaaccctattttctaaaatcaaggccaggtgctgtaatccctgtaattccaggtgttcacacctgtaatctcaccacttaggaaggctgatatgggagcattgcttgagaccaggagttcaagaccagcctggccaacacagcaagaccctgtctctattaaaaataataataatcaagactttatacttcatttggggaaaatatctgattaaattttttgctcctcttaaaagcaaaaattttccccagcaactcatatgtatttaaaaatttatatggcagataccaatcagacattatgcttatattcactgtttactttcataggcaaacattattattttatttattcccaaatggtgcaagtattttagagtatgccacatagttttctatatgccagcagtctttttcaaaaatacgtatacattccacttcagtccccctcatactgtaaatttgtagacaacatgcttgttacattgctctcttcctgcaatacagtccttatttcccctccatccatcttgaaagtattcctttaatttctccagtaacactatgggtttgccatttcgggcatcaatgacattcagggatgtggccatagacttctcgcagcaggagtgggaatgtctcgaccatgttcagaagaccttgtattgggatgtgatgatggagaactgtagtaacttggtatgttttctgcctcagacaatttaggataactttgaatctgctctctaggatgatttttcattgtgatttttagggctgtctttcaagagactagttaaatttcttttcccttttccccaaagaagtggtttgggctttgttgggtaggaagtgacagcttcactagacatactcatcttccctgtccctcagtgatgttcaaacttttctctggtcatagttacagttgtctttcttcttttataaggaagggctagattaggattcagcagcctatattatataaccattgtaaaaggatccaggtttcctatttctttatgctccgaattactgtggatactccattatagcatctgatccacttgcagattaccttgacataggatcctgaattgctctaattatcaaaagaacctttataatgtatatagctttggattagataaattgaattcatttaaaactgaagcaaacacattctatttcctaagcaaattttaacttattcgtggttgaaagttgtggtttaaagttgtcatctataaacattacattttaaatggaatgaatatcctataaatatcttttcttgtatactcttaacaaaacaacaatatcaataataaccttagtagtgaacactgtgtctattaaaggtagtgttctaagcatttcacatatatgtctcaaccaatttaatccttattaaattcgacaatcttattatatcctcattttccagttgagaatattaaagcccagtggatttaaatgacttgctgaaggtcatgcacagctgggaggtggtaaaggcaggaattgataccaggctctagagtctgtattttcaaccatggtattatgtgtactctcaggaaaaaaaaaaaaagatatgggtgtgtaggttatatttaaaatccttacccaacctaactgatttcttgttctttaatttcctcatcctctcaaaaaccttattcagtttcattttgatccttgatttattacaattgtaattttgacagcaaagtatgtttctatatcaagtggcctttttttctttgtaagcaggacatgacttttctaagccagatgtaattacatcattggagcaaggaaaagagccctggatgattgtaagggaagaaaaaggaagatggtgtacaggtaaaaataagtctgactgtgggaagccatctgtgtaaataacaacctgtgtggtcagggaagagacatacacttgggatgttagttggaaatctccattcacagcagagaaaaggtgtgtgatttataaggaagataaatactctgcataagctacccagtgagcttcaccttcaccttaacattcctggatgggaacttgctatccttgaagtgacaaaagaacaaatgccatccctccaagatctggtgtctggtctacctgcacgtccaggagtcccagccaaaccccggctcttcttttcacttttcttgcttttaccttcttcttgctcatcaatttttacgatgtcttccttaggttcttctgtagtcacctctgaaatatccttcaaatcttttttctctttccacagcacatctgcaattctgccttttctcattgactttttccaaagccttttaatgtgttcttttctttccagcttagagatcacatctccataatctttcatgctaccttgatctatggcttccatggcgtctgtggcctccagggcttctgtggcctccatggcctctatagcttgtaaaatgacctcctgctctgtttcagcataatcctgggatttgactgtgcttagagaactcagtggtagctctggctctaaggtaacatgttgggtttcaactagctctgatttcccggcctctctttgttcacctgcatcttctgaaggcatcaacatggaactagacatttccaattttgtctttctgtgcttcctggcaactctcaggtcctttttaactgcagagatattgggagaaaaacagttaacagaaacacagaggtcttgagtaagatcctttgtaaaatctaattcattgagctaccataagagatacaaagcagggggactaaggctttatgatatggaaatgctcggtttcatcccaccatccatattctaacaaaataagagcttggtatttgctgtggggtagatctttctcaggaatgtcactttctgtgaataagattctcccactgaactccattctcactagtatcctttcatataccttggccttacccaccctgccttttggggccctgaggttggccccaaacatgccccatatatcaccctatacatactaagctttctgctccttgcttgaaaatgtctctttcttttctttggtttggtgatctttacaggttctgacaaaggtatgcacatgtcttcagaaaagaccttaagttcttcagaccatggtatatcaaaagaaaaagtaaatgacttttctctttgtaacaaggtcaagttttcatttagctgctgctccacatgaataagcagggactgtatatcttcagcttgaatattcagcagttggcccagagtgatttctccgataatttcttgcctatataagtcaagggaaaagaagtacagtactaagctagtgatagaacaaaattcaaaaaagaaaaagttacaatggaagagagggataaagtagtaatttagaacaggctgaagtaaagtctggttaaagaagaaagaatgtagctggatgcagtggctaacgcctgtaatcccaacgctttgggaggccaaggtgggtggatcacttgaggtcaagagttcaagaccagcctggccaatatggcgaaacctcatctctactaaaaatacaaaaattagctgggcatggtggtgggtgcctgtaatcccagctactcgggaggctgaggcaggagaatcactggaacctgggaggcagaggctgcagtgagccaagataacatcactgcactccagcctgggtgacagaacgagattccgtctcaaaaaagaaaaaagaaagactgagggatggcaaggaatgtagtgccacataactcgttctattgtgcgttgctttattatgcttcacagacactgtgttttttacaaatggaaggtctgtggcaaccctgcctagagcaagcctctcagcatcatttttccaacaacgtgtgcttgcttcttgtctctgtcacattttgctaattttgatagtatttcaaactttttcatcattattattgtatccattttggtgatatgttatcagtgatcttcgaagtgactattgtaattgtttcaaggcaccgtgagctgcacccatgtaagatggtgaacttcaccaataaatgttgtgtgtattctgactgctctattaaccagccattcccccatcttttctcctcaggcctcgctattccctgggacacaacaatattgaacgtaggctagttaatagccctacaatctcctctaagtgttcgagtgaaaggaagagtcacatgtgtctcactttaaaccaaaagctagaaatgattaaacttagtgaggaaagcatgttgaaagtccagacaggctggaagcgaggtctcctgtgccaaacagcaggccaagttgcacatgcaaaggaaatgttctcgaagcaaattaaaagtattactccagtgaacacacaatgacaagaaagcgaaacagttttattgctgatgtggagaaagttttagtggtctggatagaagatcaaaccagccacaacgttctgttaagcctaaacctaatccagagcaaggccctaatgctcttcaattctatggaggctgagagttgaggaagctgtggaagaaaagtttgaagctagcagagaataattcatgaggttgaaagaaagaagctgtctccagaacataaaagtgcaaggtgaagcagcaagtgctgatggagaacctccagcatgtgatccagaagacctagctgaaataactgatgagggtgactgcattaaataacaaattttcattgtagacaaaacagccttctattcaaagaagatgccatctaggactttcatggctagagaggagtcaatggccggcttcaaagcttcaaaggaaatgccatgtctcctgttaggggctaatgcacctagtaactttaagtcaaagctcatgtgtatttaccgtaatgaaagtcctaggatcctaaagaagggtgctaaatctactctgcttgtgctctataagtagaagaacaaagcctagatgacagcacatctctttatagcatagttcactgaagattttaagcccaatattgagacccactgccaagaaagatagatcattttcaaaatattactgctcactgacaatgtgcctcatcacccaagagatgtgatggagatgtataaggagattaatgtggttttcatgcctattaacacaacatccattcttcagccaatgaatcaaggattaattttgactttcaagtcttatttaagaaacacattttgtatggcaatagctgccatagatagcagttcttctcatggatctagggaaagtaaactgaaaaccttgtggaaaagattcagcattctagatgcaattaagaatacctgtgattcatgggaagaagtcaggtatcaacatgaacagaagtttggaagaagttaattccaaccctcacggatgactttcagaggttcaagacttcagtggaggaagtaactgctgcagttacttgtggtggaaataacaagagaaatagaattagaagtggagcttgatgatgtgactgaattgctgcaacctcatgatcaaacttgaatggattaagaatctactcctggtgaagatgctttgaacattgctgaaaggacaaggatattaaaatattacattaatttagttgatacagcagtggcagggtttgagaagattgactctagttttgaaagaagttctatttgagtaaaatgctatcaaacagcaccacatgctacagagacatctttcatgaaagggagagtgaactgatgcagcaaacttctttgtcttattttaataaaatgttatacccacctcaacctttagcacccaccagtcagcagctatcaatatcaaggcaagaccattcaccaacaacaaaaaaaatgacaactcgctgaaggctcagatgatcattagcaattttcagcaataaagtgtttttaattaaggtatctgcattgatttttttttaagatgaaattttgctcttgtcacccaggctggagtgcagtgctgcaatctcagctcactgcagcctccgcctcccgggttcaagtgattcttctgcctcagcctccttagtggctgggattacaggtgcctagcaccacgcccagctaatttttatatttttggtagagacggggtttcaccatgttggccaggctggtcttgaactcctgacctcaggtgatatgcccgcctcggcctcccaaagtgctgggattacaagtgtgagccaccacgcccagcctgtgcattgattttttagatataatgctactgcacacttaatagactacagtcgagggtaaatataacttttatatgcactgggaaactaaaaaatccatgtaacttgctttactgcagtattcactttattgcagtggtctggaaccaaacccacaatatctccaaaatatgcctgtagtcagtgggacacatgatgcttctttggttgggagatttgtggacatgagtcttgaggaatcttgagaaattgaagaaatgatggaaagacaggctagtcagtggtcagaaggaaaggggtaggtgctgggtaaaagagcaaattgaaacaaagaacaaagagggaggaagagaatttatttatttttatttttatttttttgagactgagtctcactctgttgcccaggttagagtgcagtggcaccatctcagcttgccgcaacatccgcctcccgggttcaagcgattcttgggcctcagcctcccaagtagctgggactacaggcatgcaccaccacacccggctaatttttgtatttttaataaagacagggtttcactatgttggccaggctggtctcgaactcctgacctcgggtgacctgcccgccttggcctcccaaagtgctgggattacaggcatgagccactgtgcctggaaggaatagaatttaaaaagcatttttgaaatgggaagaaacagattttggaggataggagatggaaggaaccagaagaggagaaggtcaccatccaacttactgcattttctggagagtttcgtgtttcttcagcaggtgtaccagcctggtcttggtttggatgcctgtgactcttaccataaggtataaggccttagcctgcacattctcatcactgtccatcaatcccatagccagtggaatagcaaaatgatggttcatgaggcctagcctatccagcgcctcccagggtagttcacggatacgtggattggaatggattgtgtcttgtaggaggcgatgggcagtcttagaaaccaactctgaagatatctggcaagtggcaaaaatacgtttaagtaccctaaaatatctcttgtattcctctacagagcagtaaattgtgaggttgaggatggcctctattaaatcatccataagccttccactatattttcttctcatccaattttggtttgccatgctttcaagaatatcaagggaagttccttttcgcaccttggatttatccttttgttgactccttgaaattttctcttctactagagtcatagatgacaagtcccagtccttaacttggtaggatgaatacagatcacagcataggaagactggggtaccctcaggccaagggcgagcacggatcactgagttggggatggccatcaggagcaaagggccattgccgcccttgaccaaagaagcactgtggcatttggtaggcattgaatccatcccagccagccagctgcaacggagcaggaacctcatgtcggggacgattatacttggaatcaagagtagagaaatcaatatccttatcctccaaaagaggaaatttggtcttttgaatcacaagggacatgcttctctcttcttctacaacatgaggcacagtattgtcaaaagcaatgaaccgtttgttgacaagggtctctagcccctgtaattcctgccgcccttttccaaggtagacaaatctgggtacaaatactgtttcaaacataaagaagaagctaggaaggaagggtttagggacttcttgtatttcatctgcattttttaggatacgcaggtgaaccagctgagctggagggagcagctttaagcaagatactatgtagatacgctggttgaaagtcaacaacaggtcacttcgattactggcaaagcagagtggtccaaaatgcagggctgagtcgaactcggttacaagtctaccgtggaagtcccagatccggactgagccatcaatgccacctgtgacaaaaagtttcaggggaaggcagacatcaaatgaagtgatgtcacactcatgcaggcattttgtctctctccacacaaagctctgttttgattctgaagatgtcagaaagccttcatagtgccagagacaccagcagtagctttcagtgatggcacccacagaacctggcaagagtatcacacgttttagggggcagccacagaggattttgctgacaggctgaaggactaccttgttcacctgaagcacggcctctgtcaagtgtatgatgttatccgtgccataggaacagagcaaggcgtttccctgagggccttccagggtagacaatgccaatactgccccagagtgaacagtcttctctattcgggcacaactatagtgggaaagggttctcacaatgccactctcatgcccacagaacatcaatcctcctaggcctttttgcagatgggacctcccataggccaagcatcttactgtatccttacggtctgctgaagtgcacacaagatacttggctgtacaaggagagcgtgttgcatcaaacaccagcacctctgaactgcctattgccacaaagagttcctctctctctgagtcataggcccaagccaaagccttatccataacaagtagaggccaagtgataaccaggagatcccctgttactggagacaagaagcgcaataaaccatcctcagtggcacatagaatccgagtccagttatggccgcagcagacccgctgcacttgctggggagcagaaccacagacattgaagaggctataaaagtagggcaggtgatgcaatgaaaaactgtaggtggtctggcagaaaaaagtggtattatcaataaactgcagtctctgaagatcctcgtcaatattcagctgccgcagcaagttcccataagtgagattccattccctcactatgccttcactgcctgctgttagtaaggtgtggatctctggccggctatggatacatatcactgatgaggaatgggcttgaaagctgtggaggaagttaccttggtctaaaccccaagcgtggatctctccagccctgtttccagcatagaaattgccctgagagacacaagtaaaggagcaagtgatggaagagccactggcgacaggagtgaacttcacttcttccagctggccctgaccccggtgaatgaagaccctcactgtatcctcacacagagccaacagggatccctgggggccattcagggaaaatccctgtacaagctcatgatcagccataggtactatttgagccatctcgatgcccatgccatttggtaagataaaccaggtaaccacagcccccagggtaccagagagcagcaactcagcttctggatcatagaagaggcagctggtggagaaatgacagggcactgtacccagaaatctgaacgttcgacggtgatctccaaaaagcctcaggcgcatgtcaccacagtaagcaattaacatgtggtaggaacctgtgtggaccattgcttgaatgggcggccactgatccatcatgcgaagcctcatcttctctaccattcctttcatttctgtaccctttttttgtatccaaagtactgcctagaagaggatgagagatgaaagcctgactgtggaggtggatcattttccaaagtgtggggtagggaaggctgaatattcagatccctgttccctctggtgtgactaaggaaagactagacagcttgactttaggaatctcctagtacagcagctcccacttacccatggtttccctttctgtggtttcaactacctgtgtggtcaactgcagtccaaaaatatcaaaagaaaaattccagaaataaacaattcataagttttaaatggcatgctgttctgagtagcaggatgaaatctcaggcagtcccattccatcctgcctgggacttgaattatccctctgtccagcctatctacactacataccctatctgcctgttacgtcacttagtagccattgcagttatcagattaactgtcgcagtatcgctgtgcatgtgttcaagaaaccctcattttatttcataatggtcccaaagcacaagaatagtaatactggcaattcagatatgccacagagatgccacaaaatgcttcctttaagtgaaaaggtgaaggttcttgacttaataaggaaagcaattgtatgctgaggttgctaccatctatagtaagaatgaatcttcttggccgggtgcagtggctcacgcctgtaatcccagcactttgggaggccaaggcgggcggatcacgaggtcaggagttcgagaccagcctgaataacatggtgaaaccctgtctctactaaaaatacaaaaattaatcgggcatggtggtgcgtgcctgtaatcccagctactcaggaggctgaggcaggagaatcactggaacctgggaggcggaggttgcagtgagccaagatcgtgccactgcactccagcctgggcagcagagtgagactctgtctcaaaaataaaaaaaaaaaaaagaatgaatcttctgtgaaattgtgaaggaggaaagacaaattcatgctagttttgctgttgcacctcaagtgcacgcattatggacatagtgcatgatagcacttagttatgagggaaaaagcacaaaatttgtaggtgagccacatgaacacaaacatgttccaattgatggcagtcaggtttggtactatctgcaatttccgatgtccactgggggcttggaatgtatcccccatgaattcgtggggactattatactaggaattgggtatgtgatagaagcaccatgttcaaggcccttttcttggccttcagtctacttgatggagaatatgaattctgagggcctgataacatgaggtgaagaaggatcactgcatccagtcaaactgggatatggagatgggtactaaaatgagctaattcacagtcactaccatcattctaaaatgagggcagttcaggtgtgatgcatgtaaattgaattaagaaggagagggggaaaaacgaggtggctttacctgcatttttccacagggttccatccagtttaaggagacaaaacagttgaccttgatggagtagtagaagcagacaaaaggcttgttctgtggatggtgagactcccggtatagagtctcaggccagtcactcagtagaaccacatcattctttggttcttcatcattctgagagagaagaatgacctgagttaagagttctgagtccccactcattcactcatttcagaaatatttactggccaggtgtggtggcttgcacctgtaatctcaacactttgggaggccaaggcaagcagatagcttgagcctaggagtttgagaccaatctgggcaacacagcaaagccccatctctacaaaaaatacaaaaattagctgggcatggtggtgcatgactgtagtcccagctactcggaaggctaagtaagacaggaggatcgcttgagcccaggaggtcaggccacagtgagccatgactgtagcactgcacgccagcatgggtgacacagcgagaccctgtctcaataagtttaataaataaataaatatttactgagagatgagtggtcatttgttgtttttgagctaaccaacgtttaccctactactggaaagcagcactggaggggtcatccctccctcaccctcagtttgcaacagaatacatctgtatcaattggtctcttctacactttctcaaccaagtttccataaaaaaaagtaagccctcatgtcctaaagtatccaatctacataatgaattgatttctttcctagtcatctagaatgctactagttatgaggcattgagagaaatgagaaagtagcccctcaaatcatgttctgtgttccatgattcagatgaagagccacagttgagaaaggctgacaggttctatgaaagattctgagggtacagtgctgagcaaaacagacatggctctggctcttaagaagatgagtcagaggggaaacagacgttaaacaaataactaacaactgagtatacaaaacaagtaaatgcttacaaagaaaggaatacacggtggctcacccctgtaatcccagcactttgggaggccgaggcgggaggatcacaaggtcaggagaacgagaccatcctggctaacacggtgaaaccccgtctctactaaaaatacaaaaaattagctgggtgtggtggtgggcgcctgtagtcccagctactcgggaggctgaggcaggagaatggcgtgaaccccaggaggcagagcctgcagtgagctgagatcgcaccactgcactccagcctgggcgagagcgagactccatctcaaaaaaaaaaaaaaaaaaaaaaaaaaaaaaaagaaaggaatacaattctgtatgacagaggaacccaaccatggcaaatatgtatacctgtcacagttggaacaacttttttaagttccagcctacaccaaaaggaccactcttattagaattgcacacacgatacactgcctttgggaaactcatacttcacagtatgtaataggatgaccaccatgtgtggcagaccttgtcgcatgcacctctgtcactattctttctttatttatttatttagatggagtctcgctctgtcgcccaggttggactaaggtggcgcgatcttggcttactgcaacttctgcctcctgggttcaagtgattctcctgcctcagcctcccgagtagctgggattacaggcgcccgccaccatgcccggataatttttgaatttttagtagagacagggttttgccatgtttgtcaggctggtctcgaactcctgacctcaagtgatctgcccacctcagcctcccagagtgctgggattacaggcgtgagccactgtgctctgcattctgtcactattcttatgtgtacccaaggggaatgtgtgctatttacaacatggagttagctgtgtgtcagctcttctggccatgtggggtgtgtgtatatatatgtacctatcaagggagttacataccttgtaataggttacacagtagaacatatacaatacatgccaccttccagtgatgtagcagatgtctgtaatgtatgtacatgaagtcctcatgctgatcagccaaaactgagttcatgaagtttacttctggggtcacccttctcagtagctacttgaactatacccacctcctgaacaatgccccatggatctaactctccaagtttctctgcatcagaatttgtgctctgaccaactaagttggaaggtataatactaaatcaactgaagtattaaaacaactttacttataatgtccatcatacctgcttcctgcatccacaaaggatttgagactatactgaggccaatatctatctacaacttagaatctctcttctttctgtatttcttttttctttctctctctcttttttttctttagagacagagtcttgctctgttgctgttgacgtgactagagtgccatggtgtgatcatagctcactgtaacatcaaaatgctgggctcaagcaatctttccaccttagcctcttgagtagctgggactatagtcatgcaccaccacacttggataattttttttatttttgtagagatggggtctcgctatgctgcccaggctactcttgaactcctgggctcaagtgatcctcctgtcttggcctcccaaagtcctgggattacaggcgtgagccaccatgcccagccctacctgtatttcttattttcagatctcaagagcttacagcaccattgtcattgctgattcagtagcagtagcagagttgagtgaaaggaccctggtgtctgagctcccaacccctcatctctcttaatcagaaagctcatttacatacctcttattccattagttaatcatcattccttttctcctttccagcctttatgtacaaacaattcattcactcattaaatgagatcaacgctttgctatggaaaaaaactaagaatatcttaacgcaatgtatctgcctgatattactgctacctactctacatcaaatccttctccttcctcttccccctccttccatccgaatgaaattctgatttggcttagggcgatcatggacccagaaacttcagcaacatagagtactactatagtactccaaggctggcatggccctgtggctctctgagcttccctcttctatcttctatctacttgcaatttgaggctgatacctggaagtgcaacgactatcttgtaagcctaggataataagctaacataatagaaatggtggaaaagaaagaaaaagaatgcaggtccttgacaacacgtaggacaaagatgcctcttacttgtttaatccatataaatccattttctgttattgcagcagaaagtgttctaacttacctaatgcgatcatcttaatttagcaggggaagttattgggggatgtggaagggtctttcctaagttgcctatgtcttgcccatgccacagcctgccttggcaggaataattagtccagggccaccatgtgcacagctctcatacacatcacctttatgtccttcaggatcttatttatgaggaacttcaagttcttccactcaggaataagtctggatgaagatgatttcctagtgatatcccagctctttacagacatcttggattacagaacctgtggaaggtaaaggtctcttaatcaacaacatctaatgttagaacggaaattaagggaattgggaaagagggaagggcagcaagataaattagagaagtactcctttagaagccaggcgcggtggcccatgcctgtaatcccagcactttgggaggccaaggcaggtggatcacttgagcccaggaatttgagaccagcctggccaacatggtgaaaccccatctctactaaaaacacaaaaattagcttggcatggtggcacgtgcctgtaatcccagctactcgggaggctgaggcagaagaatcgcttgaacctgggaggaggaggttgcagtgggccgagattgcgccactgcactccagccttggcgacagagcgagactccatctcaaaaaaaaaaaaaaaaaaaaaaaaaaagaagtgctcccttagaaacaggagaaactcctttgttttaaaaaagataggaatagaagaggccttggggaggagccaagatggccgaataggaacagctccggtctacagctcccagcgtgagcgacgcagaagacgggtgatttctgcatttccatctgaggtaccgggttcatctcactagggagtgccagacagtgggcgcaggccagtgggtgtgcgcaccgtgcgcgagccgaagcagggcgaggcattgcctcacctgggaagcgcaaggggtcagggagttccctttctgagtcaaagaaaggggtgacggacgcacctggaaaatcgggtcactcccacccgaatactgcgcttttcagaccggcttaaaaaacggcgcaccacgagactatatcccacacctggcttggagggtcctacgcccacggaatctcgctgattgctagcacagcagtctgagatcaaactgcaaggcggcagcgaggctgggggaggggcgcccgccgttgcccaggcttgcttaggtaaacaaagcagccgggaagctcgaactgggtggagcccaccacagctcaaggaggcctgcctgcctctgtaggctccacctctgggggcagggcacagacaaacgaaaagacagcagtaacctctgcagacttaaatgtccctgtctgacagctttgaagagagcagtggttctcccagcacgcagctggagatctgagaacgggcagactacctcctcaagtgggtccctgacccctgacccccgagcagcctaactgggaggcaccccccagcaggggcacactgacacctcacacggcagggtattccaacagacctgcagctgagggtcctgtctgttagaaggaaaactaacaaacagaaaggacatccacaccgaaaacccatctgtacatcaccatcatcaaagaccaaaagtagataaaaccacaaagatggggaaaaaacagaacagaaaaactggaaactctaaaacgcagagcgcctctcctcctccaaaggaacgcagttcctcaccagcaacggaacaaagctggatggagaatgactttgacgagctgagagaagaaggtttcagatgatcaaattactctgagctacgggaggacattcaaaccaaaggcaaagaagttgaaaactttgaaaaaaatttagaagaatgtataactagaataaccaatacagagaagtgcttaaaggagctgatggagctgaaaaccaaggctcgagaactacgtgaagaatgcagaagcctcaggagccgatgcgatcaactggaagaaagggtatcagcaatggaagatgaaatgaatgaaatgaagcgagaagggaagtttagagaaaaaagaataaaaagaaatgagcaaagcctccaagagatatgggactatgtgaaaagaccaaatctacgtctgattggtgtacctgaaagtgatgcggagaatggaaccaagttggaaaacactctgcaggatattatccaggagaacttccctaatctagcaaggcagaccaacgttcagattcaggaaatacagagaacgccacaaagatactcctcgagaagagcaactccaagacacataattatcagattcaccaaagttgaaatgaacgaaaaaatgttaagggcagccagagagaaaggtcgggttaccctcaaagggaagcccatcagactaacagcggatctctcagcagaaaccctacaagccagaagagagtgggggccaatattcaacattcttaaagaaaagaattttcaacccagaatttcatatccagccaaactaagcttcataagtgaaggagaaataaaatactttacagacaagcaaatgctgagagattttgtcaccatcaggcctgccctaaaagagctcctgaaggaagcgctaaacatggaaaggaacaactggtaccagccgctgcaaaatcatgccaaaatgtaaagaccatcgagactaggaagaaactgcatcaactaacgagcaaaatcaccagctaacatcataatgacaggatcaaattcacacataacaatattaactttaaatgtaaatggactaaattctccaattaaaagacacagactggcaagttggataaagagtcaagacccatcagtgtgctgtattcaggaaacccatctcacgtgcagagacacacataggctgaaaataaaaggatggaggaagatctaccaagcaaatggaaaacaaaaaaaggcaggggttgcaatcctagtctctgataaaacagactttaaaccaacaaagatcaaaagagacaaagaaggccattacataatggtaaagggatcaattcaacaagaggagctaactatcctaaatatatatgcacccaatacaggagcacccagattcataaagcaagtcctgagtgacctacaaagagacttagactcccacacattaataatgggagactttaacaccccactgtcaacattagacagatcaacgagacagaaagtcaacaaggatacccaggaattgaactcatctctgcaccaagcagacctaatagacatctacagaactctccaccccaaatcaacagaatatacgtttttttcagcaccacaccacacctattccaaaattgaccacatagttggaagtaaagctctcctcagcaaatgtaaaagaacagaaattataacaaactatctctcagaccacagtgcaatcaaactagaactcaggattaagaatctcactcaaagccgctcaactacatggaaactgaacaacctgctcctgaatgactactgggtacataacgaaatgaaggcagaaataaagatgttctttgaaaccaacgagaacaaagacacaacataccagaatctctgggactcattcaaagcagtgtgtagagggaaatttatagcactaaatgcccacaagagaaagcaggaaagatccaaaattgacaccctaacatcacaattaaaagaactagaaaagcaagagcaaacacattcaaaagctagcagaaggcaagaaataactaaaatcagagcagaactgaaggaaatagagacacaaaaaacccttcaaaaaatcaatgaatccaggagctggttttttgaaaggatcaacaaaattgatagaccgctagcaagactaataaagaaaaaaagagaagagaatcaaatagacacaataaaaaatgataaaggggatatcaccaccgatcccacagaaatacaaactaccatcagagaatactacaaacacctctacgcaaataaactagaaaatctagaagaaatggatacattccttgacacatacactctcccaagactaaaccaggaagaagttgaatctctgaatagacaaataacaggagctgaaattgtggcaataatcaatagtttaccaaccaaaaagagtccaggaccagatggattcacagccgaattctaccagaggtacaaggaggaactggtaccattccttctgaaactattccaatcaacagaaaaagagggaatcctccctaactcattttatgaggccagcatcattctgataccaaagccgggcagagacacaaccaaaaaagagaattttagaccaatatccttgattaacattgatgcaaaaatccttaataaaatactggcaaaccgaatccagcagcacatcaaaaagcttatccaccatgatcaagtgggcttcatccctgggatgcaaggctggttcaatatacgcaaatcaataaatgtaatccagcatataaacagagccaaagacaaaaaccacatgattatctcaatagatgcagaaaaagcctttgacaaaattcaacaacccttcatgctaaaaactctcaataaattaggtattgatgggacgtatttcaaaataataagagctatctatgacaaacccacagccaatatcatactgaatgggcaaaaactggaagcattccctttgaaaactggcacaagacagggatgccctctctcaccactcctattcaacatagtgttggaagttctggccagggcaatcaggcaggagaaggaaataaagggtattcaattaggaaaagaggaagtcaaattgtccctgtttgcagacgacatgattgtttatctagaaaaccccatcgtctcagcccaaaatctccttaagctgataagcaacttcagcaaagtctcaggatacaaaatcaatgtacaaaaatcacaagcattcttatacaccaacaacagacaaacagagagccaaatcatgagtgaactcccattcacaattgcttcaaagagaataaaatacctaggaatccaacttacaagggatgtgaaggacctcttcaaggagaactacaaaccactgctcaaggaaataaaagaggatacaaacaaatggaagaacattccatgctcatgggtaggaagaatcaatatcgtgaaaatggccatactgcccaaggtaatttacagattcaatgccatccccatcaagctaccaatgactttcttcacagaattggaaaaaactactttaaagttcatatggaaccaaaaaagagcccgcatcgccaagtcaatcctaagccaaaagaacaaagctggaggcatcacactacctgacttcaaactatactacaaggctacagtaaccaaaacagcatggtactggtaccaaaacagagatatagatcaatggaacagaacagagccctcagaaataacgccgcatacctacaactatctgatctttgacaaacctgagaaaaacaagcaatggggaaaggattccctatttaataaatggtgctgggaaaactggctagccatatgtagaaagctgaaactggatcccttccttacaccttatacaaaaatcaattcaagatggattaaagatttaaacgttagacctaaaaccataaaaaccctagaagaaaacctaggcattaccattcaggacataggcgtgggcaaggacttcatgtccaaaacaccaaaagcaatggcaacaaaagccaaaattgacaaatgggatctaattaaactaaagagcttctgcacagcaaaagaaactaccatcagagtgaacaggcaacctacaacatgggagaaaattttcacaacctactcatctgacaaagggctaatatccagaatctacaatgaactcaaacaaatttacaagaaaaaaacaaacaaccccatcaaaaagtgggcgaaggacatgaacagacacttctcaaaagaagacatttatgcagccaaaaaatacatgaaaaaatgctcattatcactggccatcagagaaatgcaaatcaaaaccactatgagataccatctcacaccagttagaatggcaatcattaaaaagtcaggaaacaacaggtgctggagaggatgtggagaaataggaacacttttacactgttggtgggactgtaaactagttcaaccattgtggaagtcagtgtggcgattcctcagggatctagaactagaaataccatttgacccagccatcccattactgggtatatacccaaatgactataaatcatgctgctataaagacacatgcacacgtatgtttattgcggcattattcacaatagcaaagacttggaaccaacccaaatgtccaacaatgatagactggattaagaaaatgtggcacatatacaccatggaatactatgcagccataaaaaatgatgagttcatgtcctttgtagggacatggatgaaattggaaaccatcattctcagtaaactatcgcaagaacaaaaaaccaaacaccgcatatactcactcataggtgggaagtgaacaatgagatcacatggtcacaggaaggggaatatcacactctggggactgtggtggggtggggggaggggggaggggtagcattgggagatatacctaatgctagatgacgagttagtgggtgcagcgcaccagcatggcacatgtatacatatgtaactaacctgcacaatgtgcacatgtaccctaaaacttaaagtataataaaaaaaaaaagataggaatgaaaatgaactactagtatttgcaacaacatagatgaaactcaaaaacttaatactgagtacaagaaggcagacacaaaacagcacgtattgtatgattccatctatatgaaattctagaaaagagtcatctaggccgggcgcagtggctcacgtctgtaatcccagcactttggggggccgaggcaggtggatcacgaggtcaggagttggagaccatcctggccaacatggtgaaaccccatctctactaaaaatacaaaaattagccaggcgtgatggcgtgtgcctgtggtcccagctactcagaaggctgaggcaggagaatcgcttgaacctgggaggcggaggttgcagtgagccaaaatcatgccactgcactccagcctgggtgacacagtgagactccgtctcaaaaaaaaaaaaaaaaaaaaaaagtaatctagccaacagggccagaaagtagatcagtggttacatggggcaaagatttaggaggactgagtgggaagggatgaaagggaactttttgtagtcttgtaatgttctgtatcttgactctggtagtggttacatgggtatagaaattggtcaaaactcatcaaaaaaatatggtatactttattacatgaaaattatacctaaataaatttgattttatttgtttgtttagaaagtcttgctctgacactcaggctggaatgcactggagtaatcaaagttcactgtaacctgcaactcctgggctcaagggatccttctgccttagcctcccaagtagcttggactacaggcacatgccatcatgctcagctaatgttttattttttgtagaggtggggtcttgctatgttgcccaggctggtctcaaactcctgccctcaagcagttctcctgcctcagcctcccaaagtgctgggattacaggtgtgagccaccacactcggccttaatttcatttttaagagggaatagagtgacctggcacaatggctcatgcctgtaatcctaacactttgggaggctgaaacggaaggatcacttcagctcagaagtttgagaccagcctgggcaacataatgagaccttttctctaaaaaaattttcaaaaattagccgggtgtggtggcaagtacctgtagccccagctactcgagtacctgaggcgggacaagtgcttgagcctgggaggtcaaggctgcagtgagttgtgatcatggcaccgcactccagcctggatgataaagcgagaccctgtcctaaaaaaagaaaaaagcgaggcgtggtggttcatgcctgtaatcccagcactttgggaggccgaggcgggtgaatcacaaggtcaggagttaaagaccagcctggccaagatggtgaaaccccgtctctactaaaaatacaaaaattagccgggtgtggtggtgcatgcctgtaatccaagctactagggaggctgaggcaggagaatcgcttgaacccgggaggcggaggtttcagtgagccaagattgcgccactgcactccagcctgggcaacagagcaagactccatctcaaaaaaaaaaaaaagaaagaaaaagaaaaaaaggccgggtgcagtggctcttgcctgtaatcccagcactttgggagaccgaggcaggcgcatcacaaggtcagcgtcaagagatcgagaccatcctggccaacatggtgaaaccctgtctctactaaaaatacaaaaaattagctggtcatggtggtgcacgcttgtagtcccagctactcaggaggctgaggcaggaggatcgcttgaacctgggaggcagaggttgcagtgagccaagattgcaccactgcactccagcctggcgacagagcgagactccatctcaaaaaacaaaccaaaaaaaaaaaaaaaagaaagaaaaaagaaaaagaatagagtgaagtgggtgctttatatagtctagaaacagaacaaaaaatacattaagtaaagctttcaggtgagtttaggtgagccagctgtagcttagctgaaataatgcaggggcctagccctcccttagctctctttattaggaatctaatatttgtggacataattatatttattaaccatcatccttctttcctacggaagtcctcatatatgtaaaagtcacccactttccacaaatatttcctcacggctcattatatgccgactgtgctgagagctagagatgaagcagggaagaagaatgagtatctgcctggatggggtttactgtctagcatagaagacaggcactgaacaagttcatatagatatccaattatgacaagatgccaggctaaaataacctgaaagcctcacactacaaaatccgagaaattctgggtaaaataacaagtacctgagcttcaggaaccagaaactagggaagtagagggtaacccacagcaacaagtgctgactactgttgtgctggtcctgagaaggtgtagttaccagagcccataaagaccacaaatatcaatgaccacaatggctagtggcttggatagtattgccctggtaaagagaagacccaggactcgggccaatgatagggagttggaattaaaacccttccatgaagcactggaatgcttgacaaaaacaaacctcagagagagagacttccacagacagagctgactcatgaccagcttcctgaaagcttacacttctttaaacttttatccaggcataccccaaattcacagggatacctatcacgttctccaaatgattctctgacatgtccctcacttggactgacaagggagaaaagaaagaaggagaaacaccacagagcacatcaacaattctctctggagaaatcatcattttaatttttatacccaagaggataataatttaagagtcacaaaaaaaatccttcacaatctcttagcatgctcttcatatgttatcaaacacctactgatctcaaataaaactcccagaacacggaaagtcagatttaacattctgttatatgtgtatattaaaaatgttaaggaaactaccataaagaaaaaaaacaaaaacagaggccgggcatggtggctcatgcctgtaatcccagcactttgggaggccaagatgggcagatcacctgaggtcaggagttcaacaccagcctggccaacatggcaaaaccccacctctactaaaaatataaaacttagccgggcatggtagcatgcacctgtagtcccagctactcgggaggttgagtcaggagaatcacttgaacctgggaggtggaggttgcagtgagccgagatcgctctaatgcactccagcctgggtgacacagcgagactccatctcaaaaaaaaaaagagagagagaaagaaagaaaaaaaacaaatagaatgcatgattttaccagttgaggaaaaggggtatgaaataaagaaaacattagaaaacattaaccaattcaatattagaaataaaataagaagggaaaaagaggtatgatatatagaaatgaggtgatagaaacaaatctttcattatcataataaatatagattaaactcatcacataaaagagagaccaaattgaatatttaaatgaattaagtacgtgctgtttataagagaaaaatctaaaacgtaagacatagaaactttacagtatcatgggcttctgttccttaaaatgatctgaaagcaataaggagagtaaaaaaaatctttgcaagctcaacattcagcaaaacaaggagaagtataatctgtagacaacaaattacatgtaaaagttgggaaaagcagctcaaatgaggaacaactatagggaggaagtggagacaagaaactatgcaaagaaatttgagcagaaagaaagacaaacagaagcagatataagaaaacacctgtggtggctcacgcctgtaatcccagcactttgggaggccgaggcgggtggatcatgaggtcaggagatcaagagcatcctggccaacatggtgaaactttgtctctactaaaaatacaaaaattagccgggtgtggaagtgtgtgcctgtagtcccagctattcaagaggctgaggcaggaaaattgcttgaacccgggagatggaggttgcagtgagccgagatcgtgccactgcactccagcctgggcgacaaagcgagacttcatctcaacaaagaaaaaaaaaaaaaaagaaagaaaaagaaaaagcaaaggaaaagaaaacacctgggaaattaaatttcctacaggtgaggagtccaccgtcaggtagggatctatacctcttgtttgcaactacactgtaagaaactggaaagcaaaaacagaggagacagagttgatcagtctcctacaaaagccatatgtgaggcagaaggaacctcttaaaagaaaaactcatccaggaaaacccaacttaggcaatgttctgcaagaaaaaagggactagctacattaacccaaaactacaaaacgaactctgaaggaaagagtaacaaagtaaactaacatatgaagagctttcactggaaaactgcctcaatggatcagataaaaattataactaggccaggtgtggtggcttttgcttgtaatctcagcacttcaggaggctgaggtgagaagattgcttcagcccaggagttcaagaccagcctgggcaacatagcgagaccccgtctctacaaaaaataaaaaactagccaggagtggtggcatactactgtagtctcagctactcaggaggttgaggtgggaagattgcttgagccctggaggttgaggctgcagtgagctatgatctcaccactgcactccagcctggacaacagagtgagacactgtctcaaaaacaaaaaaaaattataaccaaatattttgccgtgaatgaaaaaaaagacttgatgcaatttcctctgtgatggaagaccacaaagcaaaaatataaaaatccagggaggagatgctgaaagaacagggtaagaacaaatagagagcaggcagaaatcgaagaaaaatcaagtatcacaagcataaggacaaaagttgaaagaacacaagggagaaaaacccagtgaagaacctggaggacaaaaatgggaaaagcaggccgggcgtggtggcttacacctgttatcccagcactttgggaggccgaagcgagaggatcacttgaggtcaggagttcaagaccagcctggcaagcatggagaaaccccgtctctactaagaaatacaaaaattagctgggcatagtggtgtgtgcctctaatctcagctacttgggaggctgaggcaggagaatcgcttgaacccaggaggcagaggttgcagtgagccgagatgggaccactgcactccaacctgggcgacagaacaagattcagtctcaaaatgaaaaaacaaacaaacaaaaaaaacaaacaacaacaaaaaaaaaccagaaagaattacttagaaaatatgtagtttcaacaaatgttgctgggacaactgaatatctacatgcagcataataaatttggacttctacctcaaaccattaaaaaaattagcacgaaatagatcaaatacctaaatataagaactaaaaccaggaatctttgtcactttggactaggcaacggtttcgcagacatggcaaaccataagcaactaaaaaaaaactggacttcatcaaaattaaaaacctttgtgcactaaggaaaggacactattaaaaaaactgaaagatttcacacaggtccaagatttgctgaaaaaggaaaaaaaaagaaagaaaaagtgaaaagacaacccacagaatgagagaaaatatttgtaaatcatgtatctaatacgggcctagtatcctgaatatataaagaactgttacaactgaactacaaaaaggcaaataacccagttaaaaattggacaaaggatttgaatagaaattactacaaagatatatacaggctgggtgaggtggctcatgcctataatcccagcactttaggaggccaaggcaggcagatcacctgaggtcaggagtttgagatcagcctggtcaacatggcgaaaccctgtctctactaaaaatacaaaaatgagccaggcgtggtggcatgcacctgtactccccgctatttgggaggctgagacaggagaatcccttgaacctgggaggcggaggttgcagtgagccgaaatcgtgccactgcactgtagcctgggagagccagatttcgtctccaaatatatgtgtgtgtgtgtgtgtgtgtgtgtgtgtgtgtatacaaatggctaagagccacatgaaaagatgctcaacatcactggttattagggaaatgcaaatcaaaacctcaataagatacttcacatctaccaagatggctttaattttttttaatggaaaataacaagtgttggcaaggaaatggagaaatgggtaccctctgacattgcttgtgggaatgtcagatggtgcagtggctgtggaaaacagtatagtcaattgttttaatttaatgttgtcttggtatcaattttaaatacaagtttaactttctcatacaagaaacaggaatcagtcacccttgacacagttttcagttccataccacacctaaaggactcaggacggtggccagagataagaacttagaggcatctctcccacctagaagactgggctccctgcggttccacagcttcctttaaaataatttgtcggctgggagcaatgactcacacctgtaatcccagcacgctgggaggctgaggcgggtggatcatttgaggtcaggagttcgagaccaacctggccaacatggtgaaaccctgtctctactaaaaatacaaaaaattagctggacatggtggcgggcacctgtaatcccagctactttggaagctgaggcaggagaatctcttgaacctaggaggcagaggttgcagcgagccaagattgtgccactgcactccagcctgggcaacagagtaagacactgtctcaaaaaaaaatttattatattaaataaataataataataataaataataaataaaataaaataattcgcctatgggccaggcacgatggctcatgcctgtaatcccagcactttgggaggccaaggtgggtagatcacttcaggtcaggagttcaagaccagcctggccaacacggcgaaaccccagctctattaaaaatacaaaaattagccaggcatgttggtgcacgcctgtagtctcagctacttgggaggctgaggcaggagaattgcttgaacgcaggagacagaggttgcagtgagccgggatcagacagaacaaaactccatctctaaataaataaataagcctgtgaacttaaagtgatccacaccctgttcccttatatatactgccagtttcttctctctttctctctggccacctgactcttcattcctgccttgcatgttccggggacatctggactgccttccagactcactgtgccttccctgcccaggatctgtaagtaaaaaaatctttgaacctgttttctattgtggtaatgtgttggatttgcaccttccatctaaaaaactaggggctgcctcaggctgggtttccccaaggatgcgagagggaacataacgctgggctcccggtgtcagagctggggcatgggtcagacaagagccacaaggacatctgccagtataaacaagtttcctgcacaaagtttcccctggtcatgggtgggacaactgagagtcaggatgtctaccaggtaaaagaaatattctaggccaggtgtggtggctcacacttgtaatcccggcactttgggagaccgaggtgggaggatctcatgagtctgggaatttgagaccagcctaggcaacagagtgagacatcatctcaaaaaaaaaaaaaaagtattctgtgaaagtcacactgtaaacacccatatccagctccccttcatttcccattaggtttaggattgctagctgctctggtactggaacccaattttttttttttttttttttttgagatagagccttgctctgttgcccaggctggagtgcagtggcactatctcagctcactgcaacctctgcctcccaggttcaagtgattctcctggctcagcctccagagtagctgggactacaggagtgtgccatcacatccggctaatttttgaattttcagtagagacggggtttcaccatgttggccaggctggtctcaaactcctgacctcaagtgatccaaccacctcagcctcacaaaatgctgggattacaggggtgagccaccttgatttttttattattaagttcaacatacattagattactctgtaaaactgctataaaagttcctaaatgcttactctgaatttctgtacttatcttgtggaggagaaggacaaatagctcccagctgacaccagtgtgctaatggaggacctcctttgggatttctatccctagctgaacaattctagccctttcttttccacctagcaagagtcactacctctttttcttcttttatcttactaaatttctaccataagtaaagcttatttattttattattatttttagatggattctcactctgtcacccaggctggagtgcagtggtacaatctcggctcactgcaaactctgcctcctgggttcaagcaattttcctccctcggcttcctgagtagctgggattacaggtgtgcaccaccatggctggctaatttttgtatttttagtacagacagggtttcaccatgttggccaggctggtctggaactcctaacctcaggtgatctgcctgcctcggcttcccaaagtgctgggattacagccatgagccaccacacccagcctaccataagtaaagtttaaactttccaaaatcctgcatacaactctcaagtacatgcaagggaagaccaagtggcccctgcaaagaaggattttttaaaatgagaaaattaaacatatttaaaagtcaaggggaagaagccactaagaagggagagtgaaagtacaggaaagagagagtgggctgctacagcaagctgatgtgtgaagagaaataagagttcgatcccacaatctcagagccttcccaaagtttcctctggtgatttacgactaggagctctaactgggaaaatgggggtttcctgacgcttctaaatcttagactaagacttcattccattaagtttttggtgagagtcagatatttcactttaacccttcttgacctcagagaaattccctgttctttttccctactaaagcatttagaaaaagagaggctgggtgcagtggctcatgcctgtaatcccagcacttttggaggccaaggcggatggatcacctgaggtcaggagttcatgaccagcctggccaacacggcaaaaccccatctcttctaaaagtacaaaaattagcatgcacctgtaatcccagctatttgagaggctaaggcaggagaatcacttgaaccttggaggcggaggttgctgtgagctgagatcgccccactgcactccagcctgggcgacagtgagactttgtctaaaaaaaagaaaagaaaaagacagtgagataatgaaataaaaatgcattataattttaaaatgcagtattaatgcagggtgctattaagtatgagagaagtgaggggcacactgaaatcaagggagaatgagatggaacagaaactttagagtcaaatagacttacatttaaaaagctagattttccccttcaactttttttcctttggacttttcagattgaacaaagttttatctcatctatggcagacgtcttaatgaggtcagtgggaccaatgccactcaatatacattcgccccatggggaaaacctgttactaacatcatacaaacatcataggcttcccctctgaatctccattgcctcctggctcacacacagaggattacatgcccctagttctagaagagacagactccagctacaatttcccctagaaagagtgtcactggcttcaacatcataatgcctcggactcccccagcccctcccccatatgtccagtgaaagcagcaacatgaagagcatgaaaatccccacatgaatatgccaagcgctgggaggcaggggaaatctggtagtttgtgatagtggaaaggggtcactacattgcggtgggatggcgagatttaaactgtccttttatgacagaatgactttctgagggctggccatttgagatcctacagccggatgagtagagacactaatatattgtgagggagggcagggagtgtgacccttttatctaaataaactttattgtgtgcttacatgtgccagacactgctctaggaactgttcatgccttgtctccaaacactgccttaaagcagggctgccagataaaatacagttacatttgaacttgatgcccggttacatttgaatttcagtgaaaaatatttgggagatacatgctaaaaaattctgttttctttttctttgttttgttttgttttgttttttgagatggagttttgcttttgttgcccaggctggagtgcaatggcgcaatggcagctcaccgcaacctctgccttccgggttcaaacgattctcctgcctcagcttcccgagtatctgggattacaggcgccggccactacgcccagctaatttttgtattttcagtaaagacggggtttctccatgttggtcaggctggtcccgaactcctgatctcaggtgatccgcccgcctcggcctcccaaagtgctgggattacaggcaggagccacagcgcccggcccttgttttcttttttaactgacatccaaacttaattgggtgtcctccattttaatttgctaaataaaatgtggcaatactacttaaagctactatcattccccttcctccaggtgaggaaatgccccaccacacagccagaatgtggcagggcgaagagtcagactccagacatgtgctgagccattatgccattgtcccgcctggccgtgctgggatgtgcatgggacgctctggcctttgtgacagaggccttgcatcagcggtttgcaagcatggccggctctttacggttctacggggtccccatgcagcccttcataaaggcaacgcttgagttccaccaggccggaagaagccatgaaacaaaagctatgagaaggccgggcgcggtggctcacgcctgtaatcccagcactttgggaggccgaggcgggcggatcacctgaggtcaggagttcaagaccagcctggccaacatggcgaaaccccttctctactacaaaaattagcccggcatggtggcgcgtgcctgtcatccaagctacaaagtaggctgaggcaggagaatcgcttgaacccgggaggcggaggctgcagtgagccgagatcgcgccactgcactccagcctgggcaacagaggcgactctgtctcaaaaataacacacacacacacacacacacacacacacacggaaaacacggccctggactccgtgtatagaacctggtgtctcagggcgttgggcaggagcagaggcaggtgtctaagccggaccattggctcccttccgcgccagcccggtgtgctatgagaaccttgttgccgcctagctgaagctgggaaaagcagccgccgcactttggcgagaaagcacgcggaacccaccgaacgcgcatgcgtgcaagccagggcggggctagggcgcgcgcgcaaaggaggggctctaccatccgcggagccacgccctccgtcacatcccacctccccgcccaggagcttccgcgaggctcgcccggcagctcctgctccacagcaggcttcctactttgacgcctcacgcgctcttcagctctctttttctgtgggtctcgcggctctccccctctacaattacgagtagtgccttgagccgggcgttcggagacccacacaggagggacaggatggggagagcggcattaaagggtggtgactcaggagttcaagaccagcctggccaacatgacgaaaccccgtctctaccaaaaatacaaaaattagccaggcatgatggcggacgcctgtaatcccacctactcgggcggctgaggcaggagaatcgcttgaacccgggaggcggaggttgcagtgaggcgagatagcgccactacactccagcctgggcgacagagcgagactccgtctcaaaataaaaataaaaaaaaaataaaggcggggtggtggtggtgacaagcccctattacggccttagtgcgggattccccttggggcgggagacgtcgtccttccgggtgcgggtgcggactgcaagtcctatcggggaccgcgacaccggactgcatccgccagcgtccagggcgtagcgccccccaggcgctgccttcgtccatctctacggggagtggcggccagaagactgggttttccccgtgcagctgtgccccacgttggggaaactgacttttcaggtaagatcccttccaagttccatggatttcgcctttccctttaacctgttccccagcgtcctctggtgatagcagatgagggtggtgacaggaatactaaagttccccatctgcctcgtgttggaagtctccatggtgttcacctccccaatgttgcctgcaagtagataggagcagagatggtacttggggaggtgaccggaactatggctcctaacatacagggcgttgggaactacggctcctaacatacaactctcagtttgccccgtctgtagctccctgtatttcgtctctccctccccctcaaagttcccaaagagaaaaggtggaggcgacaggtggattgcagctctcaggagatcctgtgggaagagggagccttcccagcaggcgccaggcggtggcttccgctccctaagtagccaagctgcaccctggcccgcatgtggctggagaaaagtgcactgccaccctgctcccgctttcaagttataaccacgaacctcaagtagttcttagtgctcccccgcagacacactgtttagggttttgttgtgtttttagtccactcactgccaaacacaacttttcaaaccgaccgcacactcccattgcctccctctaggctaataagtgcttcttcactgagaaaaccaaagctatcagatgagattctctacagactcccagcaccatgcctacctatctgcatctctgctcatatacactgcctctcctctcttgccgcaaatgaactaaccatgttcttatctaaagtccattcagcaattaggcactagattccacccccttttatctgtccagtttttgtttgtttgtttagacggagtcttgctctgtagcccaggctggagtgcagtggtgcgatctcggctcactgcaacctctgcttcccgggttcaggtgatccttccacctcagcctcctgagtagctgggactacaggcatgtgccaccacacccagctaacttttgtatttttagtagaaacgtggtttcaccatgttggccaggctggtctcaaactcctgacctcaagtggtccacctgcctcggcctcccaaagtgctaggattacaggtgtgagccagcgtgcccagccaaaagcaggagctctgtccagttcttgactccagcaattccctcaccttgaaaacaaacaacgcacacacgctcgcgcgcacacacacacacacacacacacgttaaaaaattcccctactcccatcaaccactgctccattccaggcagaactcatagaaagtattatctatatttcctgcctctaatttctcttttcttgtcctctattgaacccattccaattacacttcagcatctgtcactaccagaactgtccttgtcaaggttaccaacaatcatcttgctaaatttaatggttgactttcgattgttattctacctgacctgttggcagcacttaacacaaataatcaccccctcctccttaatacactttcttcacttagtttccttgacatcacgcattcttggttttctttctacctcattagcctctccttctccatcttctgtactgattcttccacttttctttaacctgttaatattgatgctcctccgaactcaatctttgttcctcttccttatccacactcccttggtcatctcatccagtctcatggctttaggtatcttctcatctggggttcataatatggccccttgttacttttttttttttttgagacacagtcttcactctgtcacccaggctggagtgcagtggtgcaatctcagctcaacgcaacctcctcctcccaggttcaagcaattctgcctcagcctcccaagtagctgagattacaagcgcccgccaccacgcctggctaatttttgtattttcagtagagacggggtttcaccatgttggccacatgggtctcgaacccctgaccttcagtgatccgcccgcctcggcttcccaaagtgctgggattaccggtgttagccatcgcgcccagcctactttctgatctcattttctgttactctcctcttcactcaatttgctgcaggtatactggcgtttttgctgttcttccaacctgccaggcacctcattggtatcaatgtttgccacatttataactccagctcatacctttcccctcaactccagagtcatatatccaattgcctattagacaaagtaaacatctaataggcctcttaatctcaatttgtccaaaactgaatttatgagttcctaatcttccttccggtatccacttccttgttaatctgccccaacacgattgtacctccagccttccaactgttcaagccaaaaaaccctgaagtcatcattaactcttccttttcgctcatacccacacccagtcttatcagtaaatccttatggctcatcctccaaatagatccagatctgcccaatagtcctctttcccctagattactgtagcagactcttcattcattccgctgcttccactccccttccctggatttctgcctacctcactgcaatctagtctctacatagcaatcaaagtgctttttaaaaatgtaagactgcaacactcctcggctcaaactctcccatggtttccatctcttgcagagtaaaagccaagaccttaaaatggttccaaagtcccaacataatctggccccgttactccaggaacactggcctttttgctgttttccaaacctgccaggtaccttattgccattgttttgccattgtagataagcgtatttatttatttattttatatatatattttttgagacagagtttcgttcttgttgcccaggctggcgtgtaatggtgcagtctcagttcactgcaacctctgcctccggggttcaagcgattctcctgcctcagcctcccaagtagctgggattccaggcatgcgccaccacgcccggctaattttgtatttttagtagagacggggtttctccatgttggtcaagctggtctcgaactcccaacctcatgtgatctgcccgcctcggcctcccaaagtgctgggattacaggcatgagccacggcgcccagccatagataagcttttgatttgcttgtaaccaataaaaaatgtttttaaaaaaatcagccaggcacaatggcgtacacctgtaatcccagcattgaacccaggaggttgaggtggcagtgagcatgattgactgtgccactgcacttcagcacggatgacagaccaaaaccctgtctcaaaacaaacaaacaaaaaagtctaatctgtaaggagcaggagaaataggatgttttttttttgagacagagtctcgccctgttgcccaggttgtagtgcaatggcgtgacctcggctcactgcaacctctacctcccgagttcaagcgattctcctgcctcagcctcctgagtagctgggattacaggtgcaccccaccacacccggctaattttttgtatctttagtagagacggggtttcaccatgttggccaggctgggttggccaggctggtctcgaactcctgacctcgtgatccacccgcctcagcctcccaaagtgctgggattacaggtgtgagccactgcgcccagctgagaaatagaattttttaaaagtatgtggtatatatttattggtattaaagttttataattagctgaaggttgaagctattgatattaaaggttcagtggctttatatgctatctatttattgtatatgccatttattggaattaaggttctataattagctaaaggttgatagtattgtttagatccttgggatcttttctttctctgattaaatctctcaaccatttatttctctctgcctttctgttaaaatatccaaaagcaggccaggtgtggtggctcacacctgtaatcccagcactttgagaggctgaggcaagtggatcatttgaggtcaggagtatgagaccagcctggccaacatggtgaaaccctgtctctacggaaaatacaaaaattagatgggtgtggctgggcatggtggctcacgcctgtaatcccagctctttgggaggcctaggtgggtggattatgaggttaggagttcgagaccagcctggccaacatagtgaaaccccatctctactaaaaatacaaaaattagccaggcaggatggcaggtgcctgtaatcccagctacttgggaggctgaggcaggagaatcacttgaacctgcgaggcagagattgccgtcagctaagatcacgccactgcaccactccagcctggatgacagagaaagactccatcttaggaaaaaaaaaaaaaaaggtgttacaatttcttattgagtattcaaatttccaacaatctgtttctccttatggttttgtcactttgctatattttaggcaggattgttagctgcctgtttaagattaacatttttccttctgttgtactttttattagatttttctttgtcctttattattttttatgtttttatacatatatcatagttgtacatatttgggggggtacatgtgctatttcgatacctgtaaacaatgtggaactatcaagtcagggtaattgggatacccatcacctcaaacatctgtcatttcttttcttttctttctttttcttttctttctttttgagacagtctcactctgttgcccacgctggagtgcagtggtgcaatctcggctcactgcaacctctgcctccagggttcaagcaattctgcatccacctccacctagtacctgggattacaggcacatgcgccaccatgcctggcttatttttgtatttttagtagagagggggtttcaccatgttggccaggctggtcttgaactcctgacctcaggtgatccacccacctcagcctcccaaagtgctgggattacaggcgtgagccaccttgccaggccgatttgtcttttctttgtgttgaaaacattacagttcttctcttctattttgaaatatataataattgttcactataatttccctactgtactatcgaatattagattctatataactgtagttttgtacacattaaccaaccaacttctctttatgtaccctctctccccttcccttcccagtctttggtaaccaccattttactctgttttatcttgactttaaattttgttttgtgagctagtaggactgctactttaggtgtcttttaattcatatttatgtagcatataattttacttccttttattttcaagctttctttttattttaaatgtattattccttgacaacatattattggaccttggtttttttaatccagtctgaaagtctctgccttttaaagggtaagtttggctggacgtggtggctcatagtggctagccaacatggtgaaaccccgtctctaccaacaatatacaaaaattagccaggtgtggtggtgcatgcctgcagtcccagctactcgggagactgaggtgggagactcccttgaacctggaaggcagaagttgcggtgagctaagatcatgccactgcactccaggctgggtgatgcccagccccctatttatatcttaaatttatcactatttgtaccttctgtgtcagtctcgatccacttaagaaatataaaacacacagtgggctaaacaaaagaaatttaatataaaaagtttttaaattctgatcaaataatgattacaggccgggcgcggtggcttacggcgtaatcccagcactttgggaggctgaggcgggcagatcacctgaggtcaggagttcgagaccagcctggccaacatggtgaaaccccgtctctactaaaaatacaaaaattagttgggcgtggtggcagacacctgtaatcccagtttcttgggagactgaggcaggagaatcacttgaacccgggaggcggaggttgcagtgagccgagatggtgccattgcactccagcccgggtgacagagcaagtctcaaaaaaatatatatatatattacaagctataaggaaactccatatggcaacctaggactaagagagaatactcaaagaaggacaaacttggaaaagggctccctccccaaagctggagttcagacgtaactggagaagacaaagcccattagccaagcaccgtggctcatgcctgcagttccaggtacttaggaggctgaggctgcagtgagccatgatcatgccactgtactccagcctggacaacagagcaagaccatgtctccccctccaaaaaaaataataaggaagaagaagaaaaagaagaaggaggaggaggaggaaggaggaggggggagggaggaaggaggagaagaaggaggagaaaagaagaagaaaagaaggagaagaaggaggagaaaagaaaaggaggaggagaaggaggaggaaagaagaaagaagaagaaggaggaggaggagaaggagaagaaggaggaagaggaggaggggtggggggaggaggaagagggaagcagaaggaagcaggaaaagtttgccagttttcccaggctggagctggtctgcagtttctgaacaaacagaaagcaaccatccagagtgcaggcaaagcacagacaatcagcgacctgtggcatgggtgtgcggaagaagcagagacgtctggggcactggttttccatattaatgcaggaaggtaattgtaaggccacaccaaagctgcaaggtcaccgagacaccagacattctgagaacatggctgtggcagagctctattggatgttctctccccaacacccaccatgcagcagccaggaacagcaggagagccccttcctctgtagcgtccttccagagcccccagttactctcacaaggatctcacattgtgctcactgtagagatgcttaaaggaattctgtccattatggcagagcatatgttaaagggtgaatttggagctgagagacaataattttttttaattttatgtatttctttatttttattttttggagacaagagttttacattgttacccaggctggagtgcaatggtgtgatctcagctcactgcaacctctgcttcccaggtccaagtgattctcctgcctcagcctcctgagtagctgggattacacgtgcccaccacccacctggctaacttttgtatttttagtagagatggggtttcaccatgttggccaggctggtctcaaactcctgacctcaagtgatccacccacctcaacctccaaaagtgctgggattacaggtgtgagccaccgcgccgggtctgagaggcagtaaattgacaacatcatctctaacaggacaagtactttaccatgatcctcatgtccctctgatctcccatccttgtcccctccattcatattgatgttgtccagaattttattttagagttatgaatattctctttatttcattagatcctagccttattagtatagcaataacaaggaacagttaccaaaataattaccaaaataaatcaccctttctttccattttttgtttttttgttgttactgttgttgacacggagtctcactctgtcacccaggctggagtgcagtggtgtgatctaggcccactgcaacctcagcctcccaggttcaagcgattctcatgcctcagcctcccaagtagctgggattacatgtgctcatcaccacgcccatctaatttttgtctttttagtagagacagggtttcaccatgttagccaagctggtctcgaactcctgacctcaagaaatcagcctgccttggcctcccaaagtgctgggattacaggcatgagtcaccgcgtctggcctcttcccatttttcttgcagcatctgtaggatttctctttctctctgtctctctctctctttttttttttttttggcccttcctccaaaactttttccaaatgggcctctatgtggcaatctttgtgaggcctcgtgagcttgaagttattttttttcaggttttaaaaataactttcattggctgggcacggtggctcatgcctgtaattccagcactttgggagggctgaggcaggtggatcacgaggtcaggagttcgagaccagcctggtcaacatggtgaaaccccgtctctactaaatatacaaaaaattagctggatgtggtgactggcgcctgtagtccgagctactcaggaggctgaggcaaaagaatcacttgaacccgggaggcggaggttgcagtgagccaagatcatgccactgtactccagcctgggcgacagatctagctagactttgtctcaaaataaataaataaataaataaaacttttatttttttaaagttaatgtgtgcattataggaaaccgaaaaacacaagaagcaaagaacaaaatcatccacaatggcaagcactttacagtttgacgtgtccttctaggccctatgtgtgtatagacacatttaattttatgggattgagatcattcagtgtgtatcatgctttttcacacatcatgaatatttatcaattcaaaatccccaagccatttgagtattttgataaccaagaatacactacaccagctcaatctgttagaaaaaatgtaatcctgtctttcttgggacaaaaatttcatagaagacaaaaatggcaacaagcctgtagatgaaagcattggcagagttcgattaaaatactgcattcccttaacgctcaatttaaatgaagttattttttgtaaagtcttcattgattgacaattcagttgtaaatttcttggttcacaattcttccccttcaatattttacttcctggtctgtttgcatccagggttgctacaaagaaatttgatgtcagtttgaaccttgttcctttgcagataatctgatctttctctctagaagcctctctctttcattccctctccttccctttctatatatctatatatccatgtatcagctttctcagcctatttgcatgcacgtgggccaaatatggctattccagcccaatattacacttcctcagttcaagcagccagcagggtttgaccagatgctctcagttttagttccaaattccttgaaaggagaagctgattggcttagcttggatctggtatacactctgggtctaattaaccatgaccaaaaggagggtcatggctgctaggctcactcctctgggggaagggacaaatcttatagaagagagaatggtgtggtattgatgattctgtcccttgttcagaggccagatttatacctggctcctgtgcttcctgtccagctactggtatgcagttgtactgagtgatggctcctctgaacatgggtttctgttccctggactcactaactctcacaactttcacttttactccacatcagccacccacaccctggaatgtattactcagaatgatttccctctgaaagtgtatgtatgtatgtatgtatttacttatttatttatttatttatttatttatttatttatttatttattgaggcaaggtctcactctgtcactcaggctggagtgcagtggcatgatcacagttcactgcagcctccaactcctgggctcaggtgatcctcccaccccagcctcctgagtagctgggaccacaaacatgtaccaccacgccaagctagttttgtattttttttttttttgtagagatgggttttgccatgttgcccaggctagtcttgaactcttggactcaagcaatccacctgcctcagcctcccaaagtgctgggattagaggtgtgaaccactgcacccaggcccctctgaaattttaaattcaagcttcccacttcaaaaaatttttttgaaacagtttgtttcccaggctggagtacggtggcacaatcactgctcactgcggcctggacctccgggctcaggcagtcttgcctcagcttcccaaatagctgggactacaggcacgtgccaccacgccccgctaatgtttgtatttttggtagagatggagctttgctgtggcccaagctgatactgaacgcctgggctcaagcaatctgcctgccccggcctcccaaagtgctgcaagcttgtggggaaaagcaagagagatcagattgttactgtgtctgtgtagaaagaagtagacataggagactccattttgttatgtactaagaaaaattcttctgccttgagattctgttaatctatgaccttacccccaaccccgtgctctctgaaacatgtgctgtgtcaactcagagttgaatggattaagggcggtgcaggatgtgctttgttaaacagatgcttgaaggcagcatgctccttaagagtcatcaccactccctaatctcaagtacccagggacacaaaaactgcggaaggccgcagggacctctgcctaggaaagccaggtattgtccaaggtttctccccatgtgatagtctgaaatatggcctcgtgggaagggaaagacctgaccatcccccagcccgacacccgtaaagggtctgtgctgaggaggattagtaaaagaggaaggaatgcctcttgcagttgagacaagaggaaggcatctgtctcctgcctgtccctgggcaatggaatgtctcggtataaaacccgattgtatgctccatctactgagatagggaaaaaccgccttagggctggaggtgggacctgcgggcagcaatactgctttgtaaagcactgagatgtttatgtgtatgcatatctaaaagcacagcacttaatcctttacattgtctatgatgccaagacctttgttcacgtgtttgtctgctgaccctctccccacaattgtcttgtgaccctgacacatccccctctttgagaaacacccacagatgatcaataaatactaagggaactcagaggctggcgggatcctccatatgctgaacgctggttccccgggtccccttatttctttctctatactttgtctctgtgtctttttcttttccaaatctctcgtcccaccttacgagaaacacccacaggtgtgtaggggcaacccacccctacacaagcttccaactttttgaccataaccacaagcgacccttctgtcacagcctcccaagtagatgagactacaggcacatgctaccacacctttctaactaaggtctctccttatccaagtctaaacttgttttgaattgacaacattcactgctcttgcactttgcaggcttcctacactcctggagaatattgtactccttggagatcattgccctacaaaaatcaagtttcttcttactcccttcacactcccagatagtaactttttacttcactctaaaaatagaatgtgggtcagatccagtggctcacacctgtaatcactagcactttgggtggctgaggcaggaggattgcttgaggccaggggtttgagaccagcctggtaaacatggcgagaccctgtctctataaaaatagaaaaacatagccgagcatggtggtgcacgcttgtagtcccagctactcgggaagctgacgtggaaggatcacaggagttcaaggctgtaatgagctatgatcacggcactgcactccagtctgggtgatagagcaagaccctgacaagaaacaaaagaaaagaaaagaaagaaggaaggaagggagggagggagggaaagggcgaagggagaagggaggaaggaaggaaggaaagaaggaaggaagcaaagagagagagacagaaagaaagaaagaaaaagaaaaaagaaagaaaaaggaaagaaaaagaaggagtggcttgggaaaaaatagaatgtattagttgggaacttgcttaacttgtgacaactaaaatgagtgattgaggcataagtctcaaatcatggaggtttattgagccatcttgagaatcagtaaacatgagtcacagaaacatctgtggctgtttggagaatctccaaagagcctacaaagaggttctcaggaggtttagtgtttatacgttttccttaaaggcggaggtgggggaggcccacagtaagacaaatgattacataattgtgagactttagttagtgcccagtaaatctaccttttacataagacaaggtgtacatttgaagaaaaagggaataggaagcatgtctcaggaaggggtgaaggaatcaaaaaggattactcttgtctttgttctgtaccaggtaagataagccagtagtcttttgaaagggctggtttagggccaggtgcggtggctcatgcctgtaatcccaaaaatttgggagggcaacgtgggcagatcacttgagcccaagagtccaagaccagcctgggcaacatggcaaaaccctgtctctactaaagatacaaagaaactagccaggaggctgaggtgggaagatcacctgagccagggaggtcaaggccacagtgatccatgattgtgccactgcccttcaacctgagcaacagagggagaccctgtctcaaaaaatggggggaagcagggagttctgtttagcccttagggaagaaaggctaatgactggtagcgaaggagggggtataacaaggcctctctgatctcccatcttattatggccatgaactcagcttccaaggtttctgtggggttcccttggccaagatggggtccattcagtccattggagactagaattttatttttatttctcatttgtcacagctacaaactttcctatcttttcttattcccccatgaaccctgaaaatttgggacaggtgtcaatttagaaagtttatgttgccaaggttgaggacacgcgcccgtgacacagcctcaggaagttctgacgacatgcgcccaaggtgttgaggcacagattggttttatacattttagggagatgaaacatcaattaatatatgtaagaagtacactggttctggctgggcgcggtggctcatgcctgtaatcccagcactttgggaggctaaggcgggtgtatcacctgaggtcaggagttcaagaccagcctggccaagatggtgaaaccccgtctctactaaaaatacaaaaattagccaggtgcggtggcgggcgtctgtaatctactcgggaggctaaggcaggagaatcgcttgaacctgggaggtggaggttgcagtgagccaagatggcaccacggcactccagcctgggtgacagagtgagactctgtctcaaaaaaaaaaaaaaaaaaagtacattggttccctccagaaagacgggaacaactcaagcagggaggggacttccaggtcacaggtaggtgagagacaaatggcattcttttgagtttctgatacgcctttttaaaggaggcaatcagaatatgcatctatctcagtaagcaaagggatgactttgaatagaatgggaggcaggtttgccctgaggagttcccagcttgaattttccctttagcttagtgattttgggggcccaagattttttcctttcacacccctcactacgctggaaaggtacatccctgtccccttgtctaaagctaattcttccacctggagtctggaccccattctctcttgctttatcagggacctggcttatcccagtattcccctgttcatcctacgccttcaagcttaccatctccatgatttggccacgtcagcatgacaaacatgacagagcaggagtatcaccaccttggccaagcactgtcgttttaagtttaccttgattaaaaactgcctaaatccaaagggcatcagcctaatggctaaggtcagcatgaccataaaccacaaataacatctccgaccagacacattccagactcctccctgaccagagacatgccagccccaagataacctccctgccagctggagagatgtcagccccaagataaccttccctccaactagagacattccaaccccaccataaacttctccccgacacagaaacattccaagctctctcaccaataaacacttagtctgtaatagagcacgctcctgactgaaatcagccagaagcccctctcaggtttattgctccaaaataaacctgtcttgactgttgagtgcttttcatgtttcttccctctctctttatttaactctttgtagagttaaggaaagtgctttaactttctttgcttaagtgcttaagtatctcctgttgacaaaaagagtcaaactctgtaaaatatttgcagagatttattctgagccagatacagtgaccatggccagtgttacagcctcaggaggtcctgacaacatgcacccaaggtgcccgggctgcagcttgattttatacattttagggagacataaggcatcaatcaatacatacaagatgtagattggtttgatttgggaagactggacaactggaagtggggtgtgtccaggtcataggtggattcaaaattttctaaatggcagttggttgactttatctaggctgggcatggtggctcacgcctgtaatcccagcactttggaaggccgaggtgggtgaatcacctgaggtcaggagttcgagaccagcctgaccagtatggtgaaacccagtctctactaaaaatacaaacattagctgggtgtggtggtaagcacctataaccccagctacttgggaggctgaggctagagaattgcttgaacctgggaggtggaggttgtagtgagccgagattgcaccactgcactccagcctgggtgatagagggagactctatctcaaaaaaaaaaaaaaaaaaaaaaaaaaaaaagacctggaatcaatagaaggagtgtctgggttaagataaggggttgtggagaccaaggttcttactatgcagatgaagtgtccaggtagcaggtttcagaggtaatagattatacatgtttattatgagacttagaaaggtgccagactcttagttaattctctcattctctcctggatcaggaaaaagacctgaaaagggaaggggattctctacaaatgttgattttccccacaagagtcagctttgcagggccatttcaaaatgtgtcaaagaaatatattttggaacaaaatacttccatttctttcagggcctcctatctgtcatgttggtatcttattgctacaaaaagtatgttttctcagtcttaaggtctctgtttcactgttcatgctggtcggctgtgcctgaattccaaagggaagaaggtataatgagacatgtccaaccacccattcccatcattgccggaactagtgtttcaggtttaccttagaatgcccttggccaagaggaggggtccattcagttgtttggggtgcttagagttttatttttggtttccactcccatattgaaatcttctcacctggccgggcatggtgcctcacacctataattccaacactttgggaggctgaggtgggcagatcacctgaggtcaggagtttgagactagtctgaccaacatggtaaaatcccgtctctactaaaaatacaaaaattagcctggcatggtggtgcatgcctgtaatcccagttacttggtaggctgaggcaggagaattgcttgaacctgggaggtggaggttgcagtgagccaagatcacaccactggactccagcctgggtgacagagtgagagtccatctcaaaaaaaaaaaaaaaaaaattctccccacctgaccttatgggctgctgctttctctcctcctcccacttcctggtcaatcgagtttaaattgtcttttcttcttaccatccatggtgagaaggtgtgttagtgaagcagccttgtagtctggagtaacacccaaggttccttgtctcacagccacaggaacaagaatgcagacacacaaagagtgaggttgagagtggaagtttactaagcgaaagaaagaaaatagctctctgctgcagagaggggtcctggaaaaatgggttgcccaatccatagtgaaacgcaggggttttataggtgatctggtgagaagatggtgtctgatttacatagggcatgaaaaactgattggatcaggtgtgccattggcataggcgtgaatcttcggtaaccccagcctgatcttttatcatgcaggtgggttctctgcctagactgtgctatgttgcccatttctttattgctgtacaggtggtaacaaaaaaagggaagatggagcctccatgttggacatgcctggccccatatagcccttttctgttggccctgctgctggcattcccccatgcaagcttctagcttccttatttatgtttgcagctcgatttttcaagctgctctttgtttagaaaagaaatgatttgggggctgctttttgttagaaaagaaattctgccgaggactcttttgccttcactacctccctaaataatttctttctacctccggtatcgttaggacttggggaatgtatctgagtcatggggcactcttccacccattacagtctagcttcaaccctcattactcactgaattggctttggtcaaggtcgtcacaatctccttgttgctaaatccagtgaagccccatcagtccttttctctgcagtagctgaccctactggccactctctccttgaagcactcctcttcctttggcttctctagtcctacactttctgattgttcttcagcctctctagcctttccctcaaagtctctgtcaatgctccgtgattatttttgtgtttctgctggtttggtttcctgagcacaggagaacttgcttagatgtgctagaaaatgtttccttttctccagacccgtttgatcgtcacatgccaatggtgttaaacttggagccgtctgctcccattcaaaggataataaaactggccaggcgcagtggctcacgtctgtaattccaacactttgggaggccgaggcaggtggatcattgggtcaggagattgagaccatcctggctaacacggtgaaaccccatctctactaaaaaaatacaaaaaaattagccaggtgcggtggcgggtgcctgtagtcccagctacttgggaggctgaggcaggagaatggcgtgaacctgggaggtggagcttgcagtgagccgattgtgctactgcactccagcctgggcgacagagcaaggataataaaacttatcttggctgagtgtggtagctcttgcctgtaatctcggcactttgggaggccaaggcagtcagactgcttgagtccaggagttcaagagcagactgggcaacatgctgaaaacccatctctacaaaaaaatgcaaaaattagccaggcatgatggtgcatgcctgtagtcccagctacttgggaggctgaagtaggtgtgttagcactttagggaatgtatctgagacacacagcaacaaaatatgttagtggtggtgaatccatagggtctgtagcaacctcaattcttgcctcctcagaagaattcgaccgaggggcataaggcagggtgagagactgaggcacattgtaaaggagaagtgaaaattaattaaaaagctttaaaggctgggtgcagtggctcacacctgtaatcccagcactttgggaggccaaggagggcagatcatgagatcaagagattgagaccagcctggccaacatggtgaaaccctgtctctactaaaaataaaaaaattagccgggcgtggtggcacgtgcctgtagtcccagctactcaggaggctgaggcagcagaatcacctgaactcgggaggcggaggttgcagtgagccgaaatcgtgccactgcactccagcctgggcaacagagtgagactccgtctcaaaaaaaaaaaaaaaaaaaaggctttagagctggaaagaaaggaaataaaatacacttggaggaggtccaagcaggtggagatcaggtgtgtggtttaaccctggacttgggattttatacggacttggaggtttatccattgatatgcttctggggggtggcattccttccctgattctttccttggggtgggctgtccacttgtggccagcacttgggagggggtgcatgcgcagtgtgtttaccgaagatgtacacatgcccacttgaagcattcttcccttactagtcaagtgttcttagaagaaggtcatataccagttaaacacagccattttgcctcttagtgcacatgcttgagcccacttgcccaagtcctaagatcttatagggaagctgctgatcagcagttccaggagttttctatctattgggatactgcctttccctggtgccgactgtgaccaattattattttagagagatttttggggcagggcacaggggacacggactagctacctactataacaggtggatcctttgagcccagggaggttgaggttgcagtgagctgtgagtgcaccactgaaatccagcctaggtgacagagtgagaccctgtctcaaaagacaacaacaacaggccgggcgtggtggctcacacctgtaatcccagcactttgggaggccgaagtgggtggatcacaaggtcaagagattgagaccatcctggtcaacatggtgaaaccccgtctctactaaaaatacaaaaattagccaggcgtggtggcacgtgcctgtagtcctagctactcgggaggctgaggcaggagaatcgcttcaactcaggaggtggaggtttcagtgagccgagatcatgccactgcactccagcctagcaacagagtgagactccctcttaaaaaacaacaacaacaaacaaacaaaaacttatttcagggagaaatgcttgcattccaaggtagggactctccgttctcttcctgagagaatttattcacattccaaagcacttgtttacactagggagatcagttttctctccctctctcaggagggctgtgaagcacgtgggcagcacgtagtctacataaactgtcaggtttacactttcagggtttgtcccctgtgaggcaagaaactctgttgtatggtcatggtccatctggctcctgccatgtcacctgtagggtactggacatgggaaactgatgcagttcttgctgtgtgtaataatattgtctgatttctgagctagaaaccccatgtttgttttttaacaggaaaaaatttaattgggaggtcattgggctgagacagatccagtgatttgggttcctacataagcaacctgaagcccaatgtaaacagtaaaacaaaactagagacttaaccagtcagaaactgctaactgtaaaccaaaaattaaaacctaagctcccccaccaaccaactgaaaggaactcctccaggccaaggagaccccagagaaacctgaaaacctgaattcctggccatgacaggaagggagattggacacgcctgatcctatgccctgcccccacttttttggagtttaggcacaattgaccagaattgaggttaaaatagagatcctaagactgaaaaatacagactttgtgacaataagatacaaaatttcaacctaactctgatatagcatcacatgacagccgaccctgaaggaaataaaaatattttaccccaaaatatatttcttttatatattttaaatggtcctggccaggtgcagtggctcacgcctgtaatcccaacactttgggaggccgaggcaggtggatcacctgaggtcaggagtttgagaccagtctggctaacatgtgaaacctggtctctactaaaaatacaaaaattagcggggcgtggtggtgtgtgcctgtaatcccagctacttggaggctgaggcaagagaatcacctgaacccaggaggtggaggttgtggtgagcccagacagcaccactgcactccagcctgggtgacagagcgagactcttgtctcaaaaaaaacaaaaaacaaacaaacaacccccctcccaaaaaaaaaaaaaatgattttcttcatagagttgacattctggtggggagagaagagcattaaataaatatatgtcaattgctaagtactacagagaaaaatagagccaagtaaggagaatggagaatgccagggggggaagggaaggcctctctgataaagcagtatttcagtagcgatctggaggaagtgaagagtgaaccatatgtttattttggggaagaacattccaggaaaaggaacagcaagtgccaaggccctgaggggggattgcacttgacatatttgagcatggttgctggagctgggtgagaggaaaagtgataagacatgtactcagagaggtgaggggaggggctcggctgcaaatcatgtcagccttttaggccattgtaaggactttggcctgtcctcttagtgaagagccactggaggattttgaacaaagggaatggcatgatccaaagtttgttttttatttttttaattttcattttttacaaacagggtctcagtctgttgcccagactggagtgcagtggtttaatcataggtcactgcagtgttgacctcctgggctcaagcgatcctcctatctcagcctcccaagtagctgggaccacaggcggtgccatcatacccaactaatctttttctttttttgtagagacagggtctcactatgttgcccaggctggtctcaaactcctggcctcaagcaatcttcccacctcagcctctcaaagtctgggattacagctgtgagcagggaaagtgctgggattacaggtgtgagccactgcgcccagcctgatgtttgttttcaaaggatccttctggttgttgcatggagaatagaatatgagaggtctagggcaggagcagtgagatgaatgagttcattataataatccaaataagagatggtagcttggccagtaaagccagataggacctcctgtggggtataagtgaaaggaaggaatcaagaatgatttcaagtggcttgagtaaatggaagaacataaattgccatttgttgagaatgggaagaactggaggagtaacagttgtggaaagatgaaattaggatgttactggacacagtggcccacgcatgtaatcctagaactttgggaggccaaggtgggatgatcacttgagtgcaagaatttgagaccagcctgagctacatagagagaccctgtctctaaaaaaatgtttaaagcttagccaggtgtgaaggcctgtgcctgtagtcccagctacttgggaggctgagacaggagaattgattgaacctgggaggcggaggtggcagtaagctgagattacgtcattgcatccagcctggacgacagagtgagactccctctcaaaaaaaaaaaaaaaagttactgttgtcaattttatgttttatatatttaccacaatttaaaatggcaatattatacaaggcaaataaaggttgtagaaatgttccagattaaaggacataaaatagacatgataactaaatgcaatcaatatctgactctagattggttctttgtttgcttagagatggggtctcattatgttgaccaggctggttttgaactcctggcctcaagcaatcctcttgtctcagtatcacaaagtgctaggattacaggcatgagccactgtgcccagcctaggtttgctcttacaatggaagggaaggaatgctttagactgggcatggtggctcacgcctgtaatcccagcactttgggaggccaaagtgggtggatcacctgaggtcaggagttcgagaccagcctggccaacatggtgaaaccccgtctctattaaaaatacaaaaattagctgggtgtggtggtgggcacctgtaatcccagctacttgggaggctgaggcaggaaaatcgcttgaacccgggaggcagaggttacagtgagttgagatcgcatcactgcactccagcctggacgacaagagcgaaactccatctcaaaaaaaaaaaagaatgatttaaaggacattattaggacaactgacagaatgggattatggatgtaaagtattgcaaatgtatgaagttgataactgtacaacaattatataagagaatatccctatccttaggaagtacatactgaagtgttctatgtaacttgccctcaaatattccagataaatattaaattgtttatgtgtatgtgtgtggagagacagaataagcaaatgaggtaatattttaacaataatctgaataaagggcatagagttttattgcattgttttattttttcgattttttgggaatttgaaataatttctaaataatgttctaaagttcaagctgggcatggtggcacacacctgtagccccagctactcaggaggctgaaatgggaggatcacctgagcagaggaggttgaggctgcagtgggccatgatcatgccactgcacttcagccagggagagagagagactctgtctcaaaataaaataagttcaaaaacaaacaaaaaccccagtgagcctgttccttttgttccattctctttttttcttttgagacggagtcttgctctgtcatcagactagagtgctgtggcatgatctccactcactgcaacctccaactccctggttcaagtgattctcctgcctcagcctcccaagtagctgggattgcaggcacgtaccaccatgcccagataatttttgtatttttagtacagatggggtttcaccatgttggccaggatagtctcgatctcctgacctcatgatccgcccgcctcggcctcccaaagtgctgggattacaggcatgagccaccacgcccggccccattctctcttaaacccactctaatcaaaccacctatcccacaactccactgaaatgcatttgtcaaggttaccaaatatacccatttgccaactccaatggtgacttctctcactctttctcttacttgacccatcagtatttgacatagtttatcactccctccttcttgaaatgtgtgcatcttttcacttctgaacaccacttttttggtttttctcttacattcctggccgctccttctaaatatccttgacagttccccttccaaacactggagtgcccagggctcagtcctcagagccaacctatctaggagtttctgtacaccctcagggtcatttcccaatctcaatctagtgtcttttttttttttttttttttttttttttttgagatggagtcttgctctgtcacccaggctggagtgcagtggcgtgatcttggctcactgcaagctccgcctcctgggttcacgccattctcgtgcctcagcctcccaagtagctgggactacaggcgcccgccacgacgcccggctaattttttgtattttttgtagagacggggtttcaccatgttagccaggatggtctcaatctcctgacctcatgatccacccgcctttgcctcccaaattgctgggattacaggtgtgagccactgtgcctggcctcaatctagtgtctttattcactcaccttagtctgtgcaaatcatattcttccagaaatgtaagatcctcctcccattgaggtcttactcaaggccaaactccctgtcacctaaatcctggttcaaagcagttggcggctgtacatggtaggaaaagtttctcatactatcctgagcacgcatgctgggagaaagatgggaggctggaagccccttctaatatgctggagagatctgaaatgcaattctcccttcaaaaatcagaaaactagggcccagtaaggccattacttgttgaaggtcattcagctgcttattggcaatgtctgagctaaagccctgtgctgtctccttaagtgttgatttcatgtatttgtgtcaggagcctccttaagaatctgataaaagctgcagactttttctcagcagaaaaaagcacttaacacatgccaacaacttttttttttcatttaatttgaagagtttcatggactctcaaagtacatctagacctcagattatagaaaccctgctctatcagaacaatccaaagcatggagaagtctacagcactactgatttagtaccctccacaaatcaatggtgtgaaaaagctggggacaggactgtaaatgttcaagattaaaagagtcttaggaagcataacaatcaaatgcagtatataggccttatttaattttttttctttttttttgagatggagtctcgctctgtcacccaggatggagtgcagtggcacaatctcggctcattacaacctccacctcccaggttcaagtgattttcctgcctcagcctcccaagtagctggaactacaggcacgtgccaccacgcctggctaatttttgtattttttctagagtcagggcttcaccatattggtcaggctgatcttgaactcctgacctcgtgatccacccacctccgcctcccaaagtgctgggattacaggtgtgagccaccactcccagactcaattttttgttttttagagacaaagtcttgctatcacttaggctggagtgcagtgacacaatcatagctcactatagccttgaactcctgggctcaagtaatcctcccaccacagccacctgagtagctgggactacaggcgcacaccaccacacatggctaattttttgtttgtttgtttgtttgttttgaggtggagtcttgctcattctatctcccaggctggagtgcagtggtgcactcttggctcactgcaacctctgcctctcaggttaaagagattctcctgcctcactttcccaagtagttgggattataggtatgcaccaccactcctggctgatttttgtattttttagtagagaggaggtttcactatgttggccaggctggtctcaaactcctgagctcaagtgatctgcccatctccacatcccaaagtgctggtattacaggcatgtgcctggctatataatatatatatattatatatattatataatatatataatatatatatataatatatataatatatataatatatatataatatatatatattatatatataatatatattatatatatattatatatatattatatatatatatatatatagagagagagagagagagagagagatagggtcacactcttatttgaattctgattcaaacaaactaagtataaaaggacatttagggagccacgcatggcggcatgcaccaatgatcccagctactctggaggctgaggtgggaggatcccttgagtccaggagttcaaggtcagcctgagaaatatagcaagaacccatctctaaaaaatgaaaaaaaaaaaaaaaaaaaaaaaaacattttggggaggggaacaaccacggaaatttgcatagactgagtattggatgatattaaggaattattttgttacatttgaaaatcattatatagaaaaatgttattttttagagctgaaatatcaaagtatttagggttgaaatatgatgtctaggatttactttaaaatacttcaacaaagaaaaaaatagatgaagcaattttggcaaaatgttaacaattaattataggcgatagggagctgggagttcattataatactcttctacttttgtgattgaaatttttcataaaaacacaaacaactgttctttgacattctggcaaagacaggaagatatctgggttgtcacagtcagtacccaaattctgagtgtccctgaagagtcattcatagactttctgactctaccaccacagactatctgctgggttttgtttctttttaccagaggactcactaatatcctgactctagactagctcctacaatgaaagagaaagatctactataaaggacattattaagtcaactgacaaaattggaatatggatggtagatttataaatgaatcagataggtattgttattctctttctggatctttcaaggaatttatccatttcatctgcgttgtcaaatgtatggacatagagttgttcatagcagtctcttatctttgtaaatatctgtaggatctgtagtgatggctcctctttcatgcctcatatttgtgatttgtgcactatcctttttttgacacagacaaacagaggccaaaaggagaaatgactcaggtcaagactgcagagccagctgggctatccttaactcctgctgccttgcctggctgtcaggtgaatcatcctttttgagtcttcctgctcccagcccacagctctcacatatcctttttttaatttttattttattattattatttttttgagatggagtctcgctctgtcgcccaggctggatggagtgcagtggcatgatcttggctcactgcaacctctgcctcctaggttcaagcaattctcctgcctcagcctcccaagtagctgagactataggcacatgccaccacacctggctattttttttttctgtattttagtagagatggagtttcaccatgttgctcaggctggtcttgaacccctgagcttaggcattccgcctgccttggcctcccaaagtgctaggattacaggcgtgagccaccatgcctggtcagctctcacctattctgcgtggcctgacgtgtagtctgccatggaagagcccaactgtagagcaaggacactcattgcccttggcctctgaggtgaatctaacttctcagaatgttctcttgccctctatcctctgcttcccctcaaaagaaaaaagaggtagaggaggtaagataataaaagagagattggggtggggagtggcaaatggtaaagatggactactttttagaagcagcagtaagcctcagcgtgcctggaaagaggcagttctgccgtggcagggagaggagatcagggaaaaacagtgacaactttactgcccccttttttttttttaagatgaagtctccgctctgtcacccaggctggagtgcagtggcatgatcttggctcaccgcaacctctgcctcctgggttcaagcaattcctctgcctcagcctcctgagtagctgggattacagacacaccaccatgcccaactaagttttttgtatttttgtaagagacaggttttcaccatgatggtcaggctggtcctgaactcctggcctcaagtgatccacttcaacgtcccaaagtgctgggattacaggcgtgagccaccacacccagcctactccttttgctttaactcttgtctccttaattgctagaaggaaggttcattaagtccctaagtaactgggggggcctaattgagcctacacctagttttccaaattcttattctatcaccctacccaaattccatgtctagatggtagtaaagggaatgaaagacatagggacatcagcttagctcctttttgtttgtttgtttgtttgtttgtttgagacagggccttgttcttgcccaggctggagtgcagtggcacaaccatggctcactgcagtttcaacctcccaggctcaagtgatcttcccacttcagcctcctgagtagctgagactacagcaggcacacatcactgcacctagctaattaaaaaacaggccgggcacagtggctcatgcctgtaatcctggcaccttgggaggctgaggcgggtagatcacaaagtcaggagttagagaccagcctgaccaacatggtgaaacccctgtctctactaaaaacacaaaaattagccgggcatggtggcacgcgcctgtaatcccagctactcaggaggctgaggcaggagaattgcttgaactgagagacggaggttgcagtgagccaagattgtgctcccctgcactccagcctgggtgacagagtgagactccaacccaaaaaaaaaaaaaatttgtagagatggggtttcaccatgttgcccaggctggtctcaaactcctgggctcaaacaatcctcccaccttggcctcccaaagtgctgcgattacaggcgtcagtcaccatgcctagcctaaacttttttttttttttgctttaacttcagatggcctcaccccttagtgccatccagtgatgaagtcaccaggtggaggtggtgctggctaaaactcgaagattattcctttactctgagaatctcctcaacatccaccattcctgctatctggaactcaagtcatcagcatacagaactacaatcagaaaaagagtcagccccactgtaggcccccaaatactaagggacaaaatgttgcatcttctgattctaaagcccattctctttccactatatcaataaccctcaaattcatgccaaatgtacattagtttttgtgtctggtactttccttcttagagtgcttggggaggatggtgggaaggaatgaagaggacaaggacagactcgtctgcctcaatacatccacatagtggacaccactgtcttttgggaagcttccccctctctcaggagtacgtgagtaagttgtttccctggctaccttcctggggaaccaaagtttgcggggaaagaacacatcaaagtgcttgttgcaaagaagaacctcctctttattccacatatagaagctgtgtttccagagctgggaaagggcttcgacctggccctacctctgtgtgggcctagagatgaaggtctagggccgggcgtggtggctcacacctgtaatcccagctacttgggaggctgaggcatgagatttgcttgaacccgggaggcggaggttgcggtgagctgagatcgtgtcattgcactccagcctgggcaataagagtgaaacaccgtctcaaaaaaaaaaaaaagagagagagagagatgaaggtctagatcctggtaattaggcctttctccagttggcaatgaaaagtcccagcctccagtcagtcccaaattagagagtgggagcaacggtgtgtgtcagtgccttggtgagatgaagatcagcttcaggcaggctcttccaggcaagttctaagatcccataccgggcaatgcccacgggaaggatggtgcgcacacagttctgccatgggaggggtaccgcaccctggaactcctgaggacttctaggagtatgagaactgccacaaaacaggcagcagaacagccgttccccgggaactagctctgtggcttttagggcctcttcgtagatgatctcttggggttgaggttcctctctcattagcagctcctgaagcagcttctggattctgggggacttaagttggtacaggtccatgagctggtagaactgttccatccaagcagtgctgtcttttggatatcgctgctgcagcatccgcaaaacatggtacagtgccacaaatgtctcccacaaaggcaactcttccttttttttagaaatgggctgtgtcttcttctctaacttgggcagtttaggaaacctgcgtttatccttaaaatcccagaagtccttttgaaacatcagtgccagggtttgtttttccacagaggcatgggcacttggaaaaatgtctctggtggcaggataaaagtattgcatttccatctccttgtgagcaatggatatctgctgtgccctctcacttctgtaaggttctcctagaagatgccaatttttagcccttgggtctggaatcctcttggtagctaatggggacttttgtgtggggacagccaaaggttttggccagctctccttttcctttgcttttataggaggaatcactttcaggtattttggactcatggactgtctacttgagatccttgtgtcttgtgactccagggcctgtctgtgacggtacacaatggcttcatgtttggccagatgcagccattctaagtttccctttgaggcaaggtctttgagcagctggcacagtctatggaaaccatccctggaaagctgttctcccgcttccattcgttctaggacatggcggatccactctacatctgagaggcttacgtctgcatgttgttccttagctgggatttgggagagaggtaactgtacctcagtctgtcccatcagaggtggatgctgcaaaaaccacttccaccaggcacctagtggtttgtgttggagttcctcagcttccacggtcctccttaatatgtgggacataaatggggtctttaagtcctgtgcttgggactccaaaactgtacccaaaacatgtggaggtatgggttcatattttcccatcacttctctttctttatccattgtccctaagaatttcctgggtatttcaactactgtggcctttttatcttcccaggatatttgtttctccggcactggcactggtgttttctctttcatctccagagctgttgacatcagtttcttcaaagggctttttagaactcctagtcttatagccctgcctttgccatgaggaactcctcttaaaatggaaaggactctttcccttcctcttaggctctttcttctttgttcttgtaacttaaattgtttttctttttttaagatctctttttccctgtccacctcttcttccaatgagcagctctcctcttcctcttcctcgtcactcaaactttctgtctcttcctcactcataatttcttctttctcctcaaacacttcttccttctcctgaacctcctccttcttcttttcctttttcttcttcttcttctcctcctcttctttctccacttgcttctcctccccttcctcctcctccttcctttcctcctcctcctccctttcctcctcctcctccctttcctcttcttcctccctttcctcctcctcctcagaagacaaactctcttgcttttctagttcatctaacaggctttccatttcttcagaaaaatgctcttcactttccacttcatccacttgactggaaaacttttcttttggtttgtcacctctcttggcctctttcctctttctccaccttcgtttaaggaatgggattacctcttcttcttctattcctccttcctcttcatcatccagtatgacttctgaatgctttctggccaatttgctctcttcctcagtcattttttcttctttgtttatcattcttctcattttgttggccagttttctctgcttccgagccagtttcttctcatctttagtcagttctgatcgtttttcagaaaaatcccactctttgatatccagcttactctgttctatactcaacctgcgctccttaacaaagagtgccctcttcatctttgtcatttttatttcttcctgtgttagtttcctttcatccctggttagtttttgaagtgcctttaagattttgttcagttttgctggttccttggaaaggctctccctttttttaatcaacttccttgaagccttggctaactttctttgcccctggacaaatattctctgtcctctagtaaattccagttttcctttggcaatttcgctttcctccatggccaatatcctgtcttcatgtagcagtatcttctcctctagtgacaattttctctcaaatagttcttgttcaacttgagtcattttcctttgtctagaagtttctggagtctctcccttagacagtgtttcttttccctcaaccagtctcatcttctcctcagccagtcttttcatttccaggttcaatgccttttcttccttagcaatatccaactctcctctgagccgtttctttccttggaccattgccttctccagagctaatttcattttttcctgggccaatttctcctgttttttggccaaactatcctctacttggaccaattttttctctgtttcagccagtttctccttcttcttgatcacagtctccttttcctgtgtcagcttctcctctacctgagccagtatcttgttgaacattcccaatttgttctttacttgcactaattgctttttgctgtgggtgagtctttctttattatagagtaggttctctttcctctgagccaatttttccttctcctgggccagattcttcttttcctgagccagattcttcttctggtacagtatcatcttgttctttgtgagttcttccatgctgttgatccatctttcccttttttgggccagtttcatcttcttctcaatcaattgctcccttttccgtcccagtctttcctcttcctcaggcattttttccttgtgctgggccagtttctccttttcctggatcagcaactcttcttcctgggccagttttgtctcttcttcagacagtttctccctttgccaggccaatgcctcctcttcctcagccagtttcttcttttcctcaaccagtttcccctcttcctgattcagttcctcttctttccaagacagttcttccatgtcccattccagttcctccaattcctgggccagctccttttcttgccagtccagattttgttccctctggggcagttcttccactttctgggccaatatgtttttcacctcagccagtttccctcctttctttgctagtttctcttcttctctagccactttctcccatttcttggccagtttcttccttttctgggccaatttctccgcctcctggcttagcttctcccctctttgggccagtgtttcctctttctgggcaaacttaccctctgcctgggccatttccctgtcatcctgggttattttcacgtatgcctgggccagttttctctcttcctgggccaactgtctctcttcttgtgcaagtttctcttcttcttgtgctaatttcctctcttcttgggctcgttttttttcagctcgggctcgtttcctgtgtattctggcccatttgtgttcttcttggatgtgtctctgctcttctgtgacctgctgttctttttcttccccctcccgagacacttcttcctccaaagtcacttcttcctcatccttgtactgttgctccttggacttagatgataacatattttcccagacttgtttccactcctcccatttcagcttcttgtcctcctgaagcatttcctcctccggggatagcttctctccagcctgatgtagtttctcctcttcctgaagaagcctcttctcccattcttccttccatgccttccaggatttccttgtctcaccatggacctgtttccactcatcccaggcctttttccagtcctgccaagatggtgtcctctcaatcataaccagttttccttcttgtttgaccactttctcctctagtgtggccatttcctccacttcctcactcatatccctctcttctttggtcatttccctctttatttttcctacttttctttccttctggacagctttcctcccttgcttaggtgacttctgaaaggttttcttctcttctttctttgatatttcttttcccatggttacattacctggttctaaaaaaataactttcttgccctttttcaaaatcacttgggtttcctccaagcccagcatgtctcttgctttcttttgtgcttgttcttcttcccttggcatcacttccttgtgtctgatcacctcttgggtcacaccttgtatcatgtcctctctaattgctccttcctggataaaaattggtttcttctctggcgggactacatcccaatcaaggtcctcaagcagaaccttactttctttcttcaatagggggcagatctcctgaaagagttcccagctggggtgcctatctaccagcatctcctgagcaaatgtcactagctcagcgtttaggttttctgacatttttgtttgggaaccagatatcctcagggccataagacgacatagatcgtccctccatgatgagccatctccagcggttgacctgcggccagatattccagaggctccccgcccttggattttaacctttttagtaactggctgttccattacaggaggtgtagtttcctcatttataactttggcttcttttcccttctttttgtgcttctttttgagtttctgagctgttgctttcttgtctcttttgtcacgtattttctgcagcctcttcagggtcaatgcaatgtgatccttcgagatatctttctcttgagaatcaacatcttttgagagctttattacactggtgcttgaagaccattgggaatagacggatgcttcctccatctcaattggtgcggcctcagtcccactttcatcctctaagaggcctggctctgtgctcatctgtttagagtctctctctttcgtcttcttgagaccccgcaaccatttttggcctgcagtaaaaatcgagagatggaggtaagcaaagtatgggaagcgacatgaaacccttcccaatattaggtgtgagctaagaagaactgtcatataagaagtaacaacagagagaactgaggccttaaaaaaaaaaagcattctctttgctttattcctagccccctactcctgccaaatcctagagagctaggccttagagtcttcctgagtttgagtggatccttccttagaaagtctttttttttcattgctttcataaaaatcaattttactgaggtataatttaaacaggatatacccattttaagcaaacagtttgatgagtttgaaaaatgtatacacttttgtaattactgcaatcacaatcaggatataaggcatttctattatccccctaaattccctcctatatagtgtcccagtcaacatctatctacccttaacctctggccctaggcaaccactgatctgctttctgtgactgtagattcatttgccttttttaggattccaaataaatagaatcattaaaaaatgtgctcttttgtgtttgctttctttcaatagtttttgagattcttccatgttgttgcatgtatcactcttttttatcacagtagtatttcagtttatgaatacactataatttccttatctatacatttttttaaaaaattatactttaagttctgggatacatgtgcaaaacgtgcaggtttgttacataggtatacaggtgccatggtggtttgctgcacccatcaacccagcatcatctacattaggtatttctcctaatgctagccctcccttagtccctcacccgagagtgtcttttctatgatgagatctttccacttatctctcttcccacctggtatctctctttttttttttttttgagatggagtttcgctctgtcacccaggctggagtgcagtggcaccatctctgctcattgcaacctccacctcctgggttcaagtgattctcccacctcagcctcccaaatagctgggattacaggcacccaccatcatgcctggctaatttttgtatttttagtagagacggggtttcaccatgttggccgggctggtctcgagctcctgacctcaagtgatctgcccacctcagcgtcccagtgctggaattacaggcatgagccatcatgtcccgccagcccacctagtatctcttgatccactttaaccctaactaccctgcctcttggggaccctgaggcacagaccagattaccccttacatactatgctttttgacccctgcttggcctcgtctttggcctttgctgggcttgatggccacttcagattcttcagaaactgtaggaggtttcagggaggatttaagttcagaaggcattgagacatctaaagaaaaagccggcttttcatctctatgtgacagggtcaggttttcattcaatctctgctccacttgagtggaaaggatttggagatctgtggcccgcatccccagtagatggtccaggggttcctccccgatcatctgctgcctatgaaagtcaaaggagaagaaggactatgctgagtcaggaacaaaagggagaatgggaagcaaaaaacggttgtggaacaggcaggaggcttggcaaagtggccaagagagatggcatatgcagaggaaaataatggctgagacaaaagaaactatctaggaagccaaggtggcaatgaatggagtgatctgtattggaggctgtagaagcaggagaaaaggatgaaaatggaacttgaagaagtagcggacacataggaaaagcaatggagaaaggagtgagcaggccaggtatggtggctcatgcctgtactcctagcactttgggaagccaaggtggcaggaagatttcttgagcccaggagttcgagaccagcctgggcaatatagtgagactctgtctctacaaacaattagccagtgtggtggtgcatgcttgtagccccagctactcagaaggctacggcaggaggattgcttgagcctgggaagcagaggttgtagtgagccaagatcgcgccactacactccagcctgggcaacagagtaagaccctgtctcaaaaaaagaaggaagaggaggaggaagaggagtgaacagtcgggattgtcaaggatagtcatctaggcgtgagcaaaggctatgagaaagaagaaacatcagggagaattaatgaacagggatgaagaaatagcaaaggaaaggagggggaaaatggcgaatggggtgaagaattgaaggaagcacaaacttactgcatctcccgaaaagtctcttgtttttgggtcagctgtaagagtgaggtcctagagtggattccaatctcagccatgaggcttagggtcttgatcctcactctttcatccttgtccattaatccttgagccagaggcatggcaaaaagatgagtaatcattcctagacgcttcagcccttcccaagctagttctcggatcagcgggttggaattggttgtatcattcagtagccgacgggctgtctcagagcgtagggctggggacacctggtaagaggcaaagatttgccctagtgcaccaacacagcactggtacttcagcaaggaagcatggaccataatattgagcattgtctcaatcatgctattaatggttatttcactcatctttcttcccagccaacttcggtttgctccatctgtaaggacactgtaggttacatccttggaaagtctcatttctaggaagtgttcatcctcctccttattctttggatattctgtattacttatagctcttaccctgctgtgccagaaaaagaattcttgagacctgtcccattccagctcccgctggggtgcatgcaggttgcactgtaggtatattggggtgccctctggccaaagacgggcacgaatcactgaattggggatatagcagtcaggggcaaaaagccattcccgcccatgaccaaagtagtatcgcaatatctgataggggttgagtccatcccagctagtcagttgtagctggggaggaagcacataatggcattggtaacgtttgctcacctgcatccaatcttccatgtcctgcaaagaataatgcatggaggaacgcagtaacactgggctcccttcctcatcttcttctatcacatgtggcacagaatggtcaaaggcaatggcccggttgttgacaagtttctccagacccactaatttctgttgcgcttgtccagggtagatgtacttgggcacaaacatggtctcaaaggagaagaagaagcttggtatgaaaggcttagggacttccagtacttcatctgatatgctcataaaggaaaggcgagtcagcagggctgggggaagcaattttaaacaggacactaggtaaagactctggttaaaagtcacaagcaggtcaccccggtcatttgcaaaacagactgggccaaagtgcagtgatgagtccagaatgcctatgagtctgccatggaagtcccagatccgaacagagccatcggcagaacctgtgacaaaaagactcaaggagaggcagacatcaaaggatgtgatggcacacaggtgcagaggcagtgtttctatgaatttcaagccattctgtgacccagaggacagaaaatcatggaacttccagagacgcaggcagtttgtctctgtgatggcacccacagacttgggcaagagtatcagatgtgttaggtgacagctgctgagaatgctggcgagaggccgcagttgtactttgaccccatcaagcacagcttctgacaggtgcacatagtcatccattccataggaacagagcagagagtttccttggccaccaaaaatccctccagacagcgtggagagtgccagtacagcgccaaagtgcatgaatttttctaatcgagcacagctgtgctgggagagcactcttatcacaccactctggtgcccagagaatatcagtccctctagaccccgccccaagttgaaatgcccataagccaggcattgtacaaagtcctgagaatttggtgaggtgcctaagagatacttggctgggcaagggcagcgggttgtgtcaaataccagaacctctgagctgcctgttgctacaaagagctcctctttacctgggtcgtaggcccaatccacagcctggtccaggattgagaagggccaggtgataaccagaaggtcccctgttactggggacacaaagcgcaacaagccatcctcagtggtacacaggatccggaaccagttatttccacagcagacccgacgcaactgctggggagcagagccacagacattgaagaggctgtagaagcagggcaggcggtgcaaggaaaaactatgggcagtttggcagaagaaagtaatgctgtcaataaactggagccggtatagctcctcaccaagctctagccgccgaagcaggctccctgaagtcaggttccactccttgattaggctgtcactaccagctgttagcagggtgtgggcctctggtcggctgcggatacagatcactcctgattgatgggcctggaaactgtggagtggatggccctgctggaggctccaaacttggatttccccagcttggtttccagcatagagaaagccctgatcaaaacaggtgaagcagcaggtgatggaggagccgctgctggtggacgtgaacctctttacctctcccagctggcccttgccctggtgcataaggaccctcaccaccgtctcacacagggccaggagggagccactgggaccattcagcacgatgtcctggacaagctcatcacctggcatggagaccatgtgggctatttggaggcccgtgccacctagctcaatgacccaggtcaccactgcccccaggatgccagacagaagcatcttcatttccgggtcatagcagaggcagctgatgttgaagcggcagggcactttacccaggggtttgaatgcccgaaagtggtccccaaagagtcgcaggatcaggtcaccacagtagaccacgaggatatgaaaggagcctgcatggaccatggactggatgggtggcaatcgttcagtcatggagaatgttcttttctcaaccatgtcctcagttttgctcttcatccatgctacagcctagaagagaataagaaggaaactgcctaggccgggtgaggtggttcatgcctgtaatcccagcactttgggaggccgaggcgggtggatcacctgaggtcaggagttcgagagcagcctggccaacatggtgaaaccccatctctactaaaaatacaaaaattagctgggtgtggtgtcggtgcctgtaatcccagctactcgagaggctgaggcaggagaatcgcttgaatttgggaggcaaaggctgcagtgagccaagattgcgccactgcactccagcctgcgtgacagagcgagactctgtctcaaaaaaaaaaaaaaaaaaaaaagatgaaactgcctagagctgatggtagggcagaatattcccttatttccccatgttttatgttaaggaggaattggaggactcaagtgattttatcccttggtgatgggaattggaaatacggtagaggcaggaatcctaggacccttttcctaaccttggtttacttcgggggaaccatacaacctactcaacatggggactataattggagaaaggatgaggagagatttctggttccagaccacattcatccatggggaatatcctcctttgtcaatctgggctaacagttatatgggcatggctcttggagaatgggccaagaagggtaagaaaggcagtcttacttgtatttcttttgtgtttgatgtcacccaagagagggaggcgaagaagtgggcatcactgaagtaatagcatacacacggcatattttgaggatagcgagactctttgaacagtacctgggaccggtcactcagcacaatcaggcagttctttgggtcttccgaaggttgctggagagaggcgtggcataaactaagaggccagggcacagaggcactaaatatattctcgcacaagtcacagttggagcagttcccaaagtcatgcttcccacccgaaggacctactcctgttacactcacacgtgcataacttatcacctgtggcacagctatacttcacaagcatgtaacaaatcccccaatgcatgagggaacacaaccctgcagagtctctgtgtgcaaatttcatagtgtgaacacagggaaaaatgatgttcttttcaacatgaagttagccatgcctgccctctaacattcttttttttgttttgttttttagatggagtctctttctgttgcccaggctggaatgcagtagcgtgatctcagctcactgcaacctctacctcccaggttcaagcgattctcctgcttcagcctctcaagtagctgggactacaggcacatgccaccaggccctgctaattttttgtatttttagtggagatggagtttcaccatgttggccacgctggtcttgaactccagacctcaggtaatccgcccgcctcggcctcccaaagtgctgggattacaggcatgagctactgagtccagccccctctaacattctcgcttgtgtgtagaaggtacatgtaccataaaagacacaatatttaacagaatagtcaggcaagtacatcaccttacgcacacatggaatatagcggaatctcccaaagtcagtgcagctctaagttactgaagcttaaagctgcactaagtgagactcttgggacaccctatctggcctttaaatttgacagaggacaagcatttatacaatatatatattatcccatggtgatagaccatgtgctatgaaacatgcatctgggatcctgttttttttttttttttttttgagacaagatctcactctgtggccccatgctgcagtgcagtggcctgatttcggctcattgcaacctttgcctcctgggttccaagtgattctcctgcctcagcctcccgagtagctgaaactacaggcacgggctaccacacccggctaatactttgtatttttagtagagacgggatttcaccatgttgcccagtgtggtcttgaactcccgagctcaggtgatctgcctacctcgccctggcaaagtgctgacattacaggcataagccaccacgcctggccctgggatccttgtatgcagagccaaccatagcaaaactgagcttggcaactgttttctctggtgcctcctcccctgttttaaaaaatctctcagccaggcacagtggctcatgcctgtgatcccagcactttgggaggccgaggtgggcagattacttgagctcaggagttcacgaccagcttgggcaacatggtgaaaccccatctctactaaaaatacaaaaaattagctgggcgtggtggcgtgcgcctgtagtttcagctacttgggaggcagctgaggcaggagaattgcttgaacctgggaggctgaggttgcagtgggccgagatcatgccactgcactccagcctgggcgacagaacgagactgtgtctcaaaataaataaaataaaataatagaaaaactctctttccagaaggtcagttcctcttacaatcctccagagtgtccactttccactatcaaaatgtccttgcgagaagtctgtgactcatggaaattgatggcctacctcctgctaaggtggtgactatagtataccctgtttgcttcctgttctcaaggacaatctgtggctcttctgaaatgctcatgactgtaagacaggtagcagccaacctataatatgtttatgtcctacatatacattaccttgcttttatttatggtgtcatttaggaggagttttaaatctttccacaggggaatgagcctgggggaagacatcaccgtcagactcccttggccctcctgaggactgttgcttaaaaacctgtgggaatccaaaagagcccagcttagtcactgccattttccgagaagctaggaatcagaaagcaacaacaatgaactcatgtttattgaacaccttctgaaagtcaggaactgtgcacaagacataccttctcatttcatccactctacagcccagtaaggtaggcattatctcattttatagatgagaaaactgaggcttggagagagcaaattgggagtgaatcttagcgtgttcctgtcgtaacccagtaacatatatgggtgagagaaccagagaaaccgagagaggggctgggaaagaataccctcacaggcaaataatagtccttcacattttgtggtgtgtccggagagcattttgtgaagactgtgggttctcaaagtatggtccctggacctcatgaaccaggacagacacttaacgactgtaagtgacagacacttacgactgctgtttgtaggctggcctagttctcagacaggtgaccactctatttccttccaactcatacttcatgcttttcagctgctctggaaacatgacagttaaatttatagtctggccagcagagggcaacggaggccaacctttcctgccagatgtagaagaacttcatccgtttagagaaatggtgggaagttgttaaaaatgcaaattattgggccccaccccagacctactcaattggaaattctgagattaaggcccatcaatgaataattgttgttgctgcccatcaatctgagattaaggcccatcaatctgagattaaggcccatcaatgagttgttgttgtgttgttttgttttgttttgttttgttttgtttttaagagatagggttttggctgggcaccgtggctcacgcctgcaatcccagccctttgggaggcggaggaggatagatcacctgaggtcaagagttcgagactagcctggctaatatggtgaaaccccgtctctactaaaaatacaaaaattagctgggcgttgtggcacgcccctgtaatcccagctactctggaggctgaggcaggagaatcacttgaacccaggaggcagaggctgcagtaaaccgagattataccactacactccagcctgggaaagagtgagactcagtctcaaaaaaaaaaaaaaaaaaaaggaaaaaaaaagaaaaaaaagagacaaggctttgctctgtttcccaggctgtagtgcagtggtaccatcatagctcactgcagctttgaactccagagctcaagtgatcctcccacttcagcctcccacatgctaggactacaggcatatgccaccacacctggctaatttttgtttctttgttttgtttttgtagagacagggtctcactatgttgcccaggctggccttgagctcctggtcacaagtgatcctcctaccttggcctccccaaatgctgggatttcgggcatgagccaccacacctggcctattttgtttttttgtttcaatttttgtagagatgggagtgggggtggggtagggatgagggggtgtcactatgctgtccaggctggtctctaactcctggcctcaagctttggcttcccaaagacttggcttcccaaagtgctggcattacaggcatgaaccgttgcaccttgcttcaacaataaccaaaatgtgaaaaacactggtttagagaactgttggagtcccaattcatttggcctgggcttcctgaagcaaggtcagcaaaacacaccttctggtatgccacagagacttgctcactggatttgggatgggggaaagcagcaggcaaaacttaccatcatcatctcacatgcatacagtgggtgagagcccacagaaaagctttcaacatcaatcatttcattagttcttgaaagaatcctgagaggcagatatcatcatctccattgtacaaaagaggaacattaactcaaagaggaaaagggatgtgtttgagtctacaaagggcagatcaagactaagatccaccaggtgcagtggctcatgcctgtaatcccagcactttaagaggccgaggtgggtggatcacgaggtcaggagttcaagaaccagcctggccaacatggtgaaaccctgtctctactaaaaatacaaaaattagccgggcacggtgatgggcgcctgtaactccagctactcgggaggctgaggcaggagaatcgcttcaacatgggagacagaggttgcagcaagccgagatcacgccactgcactctagcctcagtgacagagcaagactccgtctcaaaaaaaaaaaaaaaaaaagacccaatccacagttcaggattcttctactatatcagaggaggaagaggttttgctggctgatgctcagaaggctctccgatccacaaatccactcacaatgggaacttgggactggctggcagcacacaccatcctgtctctttccacgctccccagactgcatgctgccctcctgcgatagctgtctccattctgttccactcaaccctgcacttgctgctcattctgaatgcctttcaggctctagttgatctgcttcagatcctgcacagcagtggaggcccctgtgggagttaccccaggccaaagtgggaggctcactcgctttcagccagaagttcaaggccagcctgggcaacatagtgggaccctgtctctacaaaaaaaaaaaaaaaaaaaaaaaaaaattagccaggcgtggtggcatgtgcctgtggtcctagctatttgggaggctgagatgggaggatcacttgagctcaggaggttgaggctgcagtcagctatgatggccccactgcatgccagcctgggtgacagagcaaaatcctgtcttaaaaaaaaaaaaggccaggtgcggtggctcacgcctgtaatcccagcactttgggaggctgaggtgggtggatcatgaggtcaggagttcaaaaccagcttggccaacatggtaaaaccctgtctctactaaaaatacaaaaattagccaggcatggtggcgggcgcctgtaatcccagctactcaggagcctgaggcagagaattgctttgaacccaggaggcggaagttgcagtgagccgagattgcagcactgcattccagcctgggtgatagggcgagactccatctcaaaaacaaaacaaaacaacaccaaaaaacccaaacaacaaccacaactcagagttaccccactggccccttcttgtggccctggagctgctgagagagtagtcgtttgtaacaaatttgcagtcactgccatcacttcccatattccaaatagctccactgggtcccacttctcttgaccggcctacagagagcaaatggttgggactatttgggggaatatttctaggtgatgagtgagaaggaggactttcaaaccccaaatctctatgtttatttaattttatgtggtttttttttttgagacagggtctcgctctgttgcccgggctggagtgcagtagtagagtcacagttcactgcagcctcaaacccctgggctcaagcaatcctcctgcctcagcctaccgagtaactgggaccacaggcacacacccccatgcctggctaattttttaaaaactttttgtagatacagggtctccctatgttgcttaggtggtctcgaactcctgggctcaagcgatccacctgcctcagcctcccaaagtgctgggattacaggtatgagacactgcacctggccctctatgtttatttatttatttatttatttatttatttatttgccactctttcccacaccatagaccagtttccttgggttagcctcagaggatgacatttgactccctaatcccagtacctgtccttaaaagcaagtttgtagtgagctccagatgctttaatcccaacagtcttgtttaatatcttttatttctttttccttttttattttttttgagacagagtctcactctgtcacccaggctggagtgccgtggcactatcttggctcactgcaacccctgcctctggagttcaagtgattctcctgcctcagcctcctgagtagctgggattacaggcatgcaccaccatgcccagctaattttgtatttttttttagtagagatggggttttaccatgttggccaggctggtctcgaacttctgacctcaggtcatctgcccgcctcagcctcccaaagtgctgggattacaggcgtgagccaccatgcccggctgattgtttaatatcttaacacaaagataatctaatgggagaattcaagctctgtggccaatttagcgtgaagggtatttgggaccaacgcatgttattcctgctgactgtggagacaaaccaggtccatgactgggtgttgacactggaactatattccttttcttagcaccagtccactgtaaggtacagcattagttggtggcctgaggaaaggcaaacctcccacgagctttgccttgttaaagagagttgactctagggggcgctgcactccacgacacggtcaggcccctgggctccctttggctcacttgttggctccaatgtgctctgttacaggtgagtgtgaggggatccaggcaggtttcttgctccctagagcttatagtcatcaaagaagagatataaaatggattacagtgggaaattctaggtgatgggttatattatcctttagaacttttctgcaacttttaatttcctcaaattaaattgcaaattaaattcagttttaagaaggaaaagtatgaagtgctttgagtacatataacgaggagacctggccacccaaaaggaaggtgatgagtgcgccacactgtgagacagggccctgcatggattatataaccttgcaggtggtctcacatttgggcacaggggtgcagaaagtccagctgatatcagaagggcctaattagttgactgtaaagtcagaggggcaacctaggcttacttggttctttgaatgacattactgataaggagcccaagtttgtccccagggcctgggagtgctactctggccttcaggtggctgcatagctagggctgggggtggaatgcatttaactttcttaatgggaataaatagttttccaggctgacaaacatacattaacagggtgggctagtttctgttggatggaagagttaccctggatccctgagaagtaacgacagtatccaggattaattaggttgtaaagtagtaaccaggagttttacatatcttttaattcttatttattttgagacagggcctcactctcacccaggctggagtgcagtggcatgatcatggctcactgcagcctcaaccactccggctcaagtgatccttctgccttagcctcctgagtagttgggactacaggctagtgctaccacacctggctaatttttgtactttttgtagagatggggtttcaccatgttgcccaggctggtctcaaactcctggcctcaaagaatccacttgcctcagcctcccaaagtgttgggattactacaggtgtcagccaccacacccagccaatttggtttaattcttacaattattctaacgacttagctattatcctccctgtaattaaacaaccttttttgttttttgttttgttttgttttgagtcggagtctcactctgtcgcccaggctagagtgcagtggcgccatctccgctcactacaagctccgcctcccaggttcacgccgttttcctgcctcagcctcccgagtagctacaggcgcccgccaccatgcctggctaattttttgtatttttaatagagacggggtttcaccatgttagcctcgatggtctcaatctcgtgacctcgtgatccacccgcctcggcctcccaaagtggtgggattacaggcatgagccactgcgcccggccattaaacaacttttaaaaacggacatggtaaaatattgaaaatgtactaaggagcaggtaagggaaaaaaagtcaccttttcacacctgaccagctgtccttctgtttccccttcccagaagtaactctggttgtgtctttcttttgtgtgtgtgtgtgctttttttttttttttgagatggagtctctgtctgtcgcccaggctggagtgcagtggcgcgatcttggctcactgcaacttctgcctcctgagttcaagtgattcttgagcctcagcctccctagtagctgggattacaggcgtgcgccaccacacccagcgaattttttgtatttttagcagagatgtggtttcgccattttggccaggctggtctcaaactcctgacctcaagtgatccgcccacctcccaaagtgctgggattacaggcgtgagccactgtgcctggccaaaaatatttttcttatgcaagtgatagtatactatatacactgttattcacttttctcttaatatacctttaagactaattcatattaatacatataactcatttcccaacagttactagctgcagggtattccaccgtgtggctgaactatcatttatttattcaaatttctattaatggacattcggtagtttccaaccttttgctactgcagctaatgccgcaaatgagtatctttgttagtgcctcataacattttaattttatttgattttaattaacttaaattgtagaactgaggccaggcatggtggctcacgcctgtaatcccagcattttgggaggccgaggctggcagatcacgtcaggagatcgagaccatcctggctaacatggtgaaacccagtctctactaaaaatacaaaaattagctgggtgtgatggcgcctgcctgtaatcccagctacttgggaggctgaggcaggagagtcacttgaaccagggagtcagaggttgcagggagccgaggtggcgccactgcactccagcctggcgacagagtgggactccgtctccaaaaaaaaaaaaaaaaaaagtagaactgaagcaatgaaaacatttttccattaacctaacttggaataatattttggatatatttgggttaaataaaatattaaaattaatttcatagctgggtgagatggctcacgcctataatcccagcactttgcgaggctgaggtaggaacatgtcttgaggccaggagttcaataccagcctgggcaacatagcaagaaaaaaaaaagtaaataataatgataaataaaatgaattttacctgtttatgtcaaaattaaaattgcatatgtggcttgcattacacataaaaacacacacatatataattttttttttttttaaagagacagggttctgctttgtcgcccaagctggagggcagtggtgcaatcatggttcactgcagtctcaaactcctgggcttaagcgatactcagcctcttaaatagctgggactatggccacatgccaccacgcctagctagttttttagttttagtagagatagggtcttgctatgttacccggccagtctccaactcctggccttaagtgatcctcctgcctcggtggctcaaagtgcagggtatatttctcttagctagtattgctctacattgttgtagtctggtggtggcctgatatccctactggactgaaaactccctgaaggtaggagtccagtctgtctggatttctcttgtgtctccataatcacccaacctgacatggaataggtggttaatccatttttgttgaatgagtggaaaaatgtgctctcccaggaagaaacatatgcttcccagcttcaagtgttagtgaacatcttcctagaaggcaggctgaggcggaaagggtattgactccggcttctccaccagaggaccttgcaattccagtcaattccctcggtaactcttatggaggagtggcaatataccttaaaaaaggagtgtgtgttgcggggtattccgctgcttggttatgtcaccaggtggattaaatttggacaaaatttcccaaggtgtaggtactctacaaacactagttaccctcaggaatgtgcgatcaacaaaagaatgcaagataacaaggcccctaggcagcccctgggtcttgtggctcccgtcgaaggcagagctctggagccgcctacgccggggacaggcgactacacctggggcccctcaccctcgggcctcctgcacgtggcagggaaggcagggcgtctctatctcaaagcattggctgcgcctgttacctgcgacaggattcccgacaagggacgggtacggcgtgtgcactcaggagctcctagagctaggggcagcaactaagaagctacctggcggatgttgcgagaggactccgcccacagaacggttggcccccaaccccgcagccggcggacttcccgaggccaggggtctgaacgcgcgtgcgcatgggcgcgcgcccggcgcgagaacgcgcgcgcgctctcgaaagaaaaaaaaaaaaaatcctctccgcggggtcccgcggcaatttaggccggggtctgccgacgaccgcgcgtgcgcgggcgtgcatctacgccctcctccaccgccccctccgctgggggtctagcgcactgctccgcttcccccgtttcccccgggctagcgtcctaggggtaagtgactcgagcctggcagagagtgagggagaggttccgccgaatgaagggaggaggtagacggggccaggagaaaggagaaaccgccccggcggggcgaagagcgcggctctcgagctgtagtctgcaggagacacacctccctccctcacgcccctcggggctgcggaagtgctctacagactggagctgcacgaaggcgaccagcggactaccgttcctaggaggcagcgcggcggtgcgcctacggctcccggcagcccccgcgcgccattctctttttgagttcgcggccggctagggcgaaactacagttcccaggaggactcgcgcgaagcggcttggaagtgggcagcctggaagtcactcgggccaccggagctggcggcgtctccagcgagcggcgcggagctggacgccgcgatcgtggggcccgcgaggcgggcagccggggcgtccaggtacgtggctccgggtgcaggatcggcctcgcgcaagggtggcggggaatcggtggctgcccggaccccgagggtcagcgcgggcggacggccgggtgtgggtactggccgtggggggcggcggcgccgggactcgcgccctccggacccagccggactcgtgcccgcatggctcaactttccaggcgtgcaccccggcgctgtggtgaagagcttggaggcggggagcggtggattcgcgtcccggctgtgccactcgggagccgcgatctgggaaaaccgcgccgaacctcaatttcccctgcagtaaaacggagtaggagagcatcttggcggagactctgttgagataatataataaaacatttggcacataggaggcacttactacgtatttgggttattgttagctctccgaaaaatgaggtgaagatgttatcgattgcatagggtgaggattagttgagcgtgtgcatgtaaagaggtgagtccttagttagcacccaatgcaggctagctgctgttaaccgagattattttgttaagagcgttggtttggaaggcagagagaccccaggttcaaatttgaacatttaccagctgtgtgactttgggcaactggcttcacctctctgtgccttggtttccctatctataaaatggggatttaaatagcaaccacttcgtcgagttgttttcaggatgcagtgagaataccatgtgtaaagtgcttagcacagcagctggcatataacgctcagtaaatggtaccatttattcagcgttttcctagtggcccagagaccctctgagggtggggctctggccgtagtattggtcacccccgagggccagattcagaactggtccagttgacttcccttcctactacctcaggttcctcatttacaaaatgggataataacaagatcactctcaaagggttgtaaggatttgctgagattgtatttctagtccagcgccatctctcactaagtagcagctcttatgtattataattgttcttcaatattctccatctggcccagagactgcctgactgtgggctgtgacatgacagccctgagctcccccacacatttgctcccatcctcagtgtcccatctgtggaatggtagtcataggacttttgtgccaggattgtttggatggttccaggagataattcatgtttagtgctttgcacaaggcccggcacacagtaagtgcttattaaatgattaaatgtatcttgctgtttttttttttaataggccctttttgcttctgtttgtacctacatggcagagtgagcacaaagttagtgtttttttatcttccccctccctcccaaattttacttaccaaagattaaattatggaacacactatagtagaaaggcctaagaagaaatgggtctgacctgccatcagcagtcccctgctcacacacccctccccacagagccagtatgttcactccagtgctttaattattgtcctggtgctgccagcttttgcctttgtgtcccaaagccactgagtcccctgcactccagctccagatgtggagcctgtgcttctttgatgctgtggctcaaagaagtggctgtttcttgggcaccataaactcagcatgtccaacctgaactccttctcctcctggaaccagtagtcaccatcttggcaaatgtgccagcattgacctggttgcctaagccagaaacctgggagttgctcttcttccccagccttcccatatccagtcaactagcaagaaggacgaagctgccatttcatagaaacaccatttcattggcccatattggtctcccatctgatgggcactgaaagttcccctcagcttgagacggagtcttgctccatagcccaggctggagtgcagtggcacaatctcagctcactgaagcctccgtctcccgggttcaagcaattctcctgcctcagcctcctgagtagctgggattacaggtgcccgccaccacacgtggttagtttttttttttttagtagagatggggttttcaccatgttggccaggctggtcttgaactcctgacctcaggtgatctacccattttggcctcccaaagtgctgggattgtagggcatgaaccaccgcgcctggctgtgacaaggttaagtcaagtcattagggattaacatacgtaaacctatgtaacatatgtattaataagggcaagaagatgttatagacttggctagacagcagtggctgtggatgtggcatgaaagcctggctttcaggggacccagttctgtgattttagcctggtaaagatcggctgagttgttaatttctttcagaaaagttagatggtgtcagcggcttagaatatcccgtgtgggagggtggccatcctgggcatttcaggaggcagcacacataccacacacccaagaagaggctgggaagggaatttattagcgctccccttaggttgagtttattgtcagaaacctgtcattgtgatttcatttgatgatagaaaccggtggcctcaatcacatttgtgatggccaacaaatttacctaagcattttgctaacctgaagaagtaaagcagtggcttaaaaaaaaaaaaaaaaaagcagcacgtggctttttagcagtcagtgtagaatgaatgatctaagagttaaatgtgagtctgtgtttcagacattgcagttgttaggtggtaaatcaaaagtggaatttagaatgtgcagtgattggtgcctcatttttttgctgtaaaatatattttactgatatatttcaaacatagtcttagtaacttgtaaaatgtaaattaaatgtatttacattttaataaaagaattcaataatcatttcctttaaaataaagtgtttgtttttagctattagaatgagaggctatttggcagggtgcagtggctcatgcctgtaatcccagcactttggaggctgaggtgggtggatcacttgagcccaggagtttgagagcagcctgggcaacatggcgaaaccccatctctacaaaaaattagtcaggtgtggtggcacacatctctagtcccagctacccgggatgttgaggctgtagtgagctgtgattgcagcattgcactccagcctgtgtgacagagtgagaccctgtctcagaaaaaaaaaaaaaaaaagaatgagaggctgttgtaccagtttgtgcatttgtgtattcttcaagactgatattgcttcctttttgttgtttttagacagagtcttgctctgtggcccaggctggagtgcagtggcacgatctcagctcactgcaacttccacctcctaggttcaagcgattctcctgcctcagcctcctgagtatctgggattacaggcatatgccaccatgcctggctaatttttgtatttttagtagagatggggtttcgccatgttggcctcgaactcttgacctcaggtgatccacccaccttggcctcccaaagtgttgagattacaggcgtgagccaccgtgcctggcctattgcttcctttttttaaggactattttggtcatgaccttttgtgcgtgtgtgtatgtatgtgattgggttgaatttagcttaaaaaaagttatgcaagaaattcatgcttgttgtaacgtgtcaaacaatacagaggtgtagggaaaatacctagtgccaccctccactccaaaaccccatgtcgccagagataaccatttattcagacagtgagtatctattaagtatctattgctaggctttggagatagcataatgaacaaaatggatgtgctctctgcccttgtgatttggacagatgcttcagttatctttttctgtgtttatattgattatgtttgtatgtatgtgcgtgtgtgtgtgtgtgtgtgtatcgactgttttcttcctcctcccataccattccccaaaaaaggagggggtagggatcaagctacacctatttgtaacccagttttttcaattaatggctgggcatgtccttccaagtcattacatatagatctggcttatccttttcaacagctgtacccacattcttcagtgcagagagaccacgctttattccagcattcccccactgctggtcctttaggttgttcctctgagatgtcttttttttttttttgagacggagtcttgctctatcgcccaggctggagtgcagtggcgcaatctcagctcactgcaagctccgcctcctgggttcacgccgttctcctctgcctcagcctctccgagtagctgggactacaggcgcccgccaccacgcccggctaattttttgtatttttagtagagatggggtttcaccgtggtctcgatctcctgacctcgtgatccgcccacctcagcctcccaaagtgctgggattacaagcgtgagccaccgcgcctggcccctctgagatttctttacctcagcaaacacacatctaataagtatccttggtggtggctcaggagatcgagaccatcctggctaacacagtgaaaccccgtctctactaaaaaatacaaaaaaattagccaggcgtggtggccggtgcctgtagtcccagctgctcaggaggctgaggcaggagaatggcgtgaacctgggaggcagagcttgcagtgagccaagattgtgccactgcactccagcctgggcgacagagcgagactccatctataaaaaaaagaaaaaattagcagggtgtgatgatgagagcctgtaatcccagctacttgggaggctgaggcaggagaattgcttgaaccagggaggtggagggtgcagtgagccgagattgtaccactgcactctagcctgagtgacaagagtgacactctgtctcaaaaaaaaaaaagtataaaaagtatcctttcacataggcagcatggcccagtggctgaagcacaaactctggggccacatggtctgggttcacactgtgactctatcctatattagttgtgataccttgggcaaatcatgtgtccttctgagccttagtgtcctgatctgaaaatggggatgataccagtgtcttccttatagggtggttgttgagaggtttcataagattatctatgtcaagccttcagggcagggccagctgtgatcttttttttagagacagggtcactctgttgcccacgctggagtgcagtggcgtcatcatagctcactgtaaccttgaactcctgggctcaagtgatcctcccacctcagactccctagtagctggggctacaggtgtgcaccaccacacccagctaatttttaaatttttgtagagatagggtctcacactatgttgcctagactggtctcgaagtcctggcctcaaatgatcctcccgcctcagcctacatgtgttctttcaaacccagagaaattcacaggaagagccaactcaatcacttgaaacaccaggtagaaataagaaaaagttatattgcagggatcccgcttggagatgttgggggcctaaggtgagggatccagctgccgctgaaagaagggaggagatttgcccaggaagacaggagccagtaaagtgccctgaccacagtgggtggtgggggtgaggggctggtggtggagcatcagtgggaaatatcactcctcatatttgcgagaagtgtgccatggttggaaggtggcttaggtggcgggcagaccaagttcaaatcacagtatagccactaacttgtaagatgtgcactgagcttttttcttcattggcaaaatgggtatgatagtagtctttacctcgggggtcgctggagactgaatgaaatgtctgcaagactttcagcacattaggctgtcattagccctgtgcagttagctactattcttattttattgagttgacagatgtgttgagaccctgctgtgagccagggtcctatcctaggcactgaggattcagcagtcaacaagacagacaagatccttgctgtcctagggtttacattctagccattctagcccgggaagacacacaataaacaggatcatttcactttgtgtttttgagatggagtctcgctgtcacccaggctggcacaatctcagctcactgcaaccactgcctcccaagttcaagcccatctcctgcctcaggctcctgagtaactgggattacaggcatgcgccactatgccctgctgatttttgtatttttagtagaggaggggttttgccatgttagccaggctggtcttgaactcctgacctcaggtgatctgcctaccttggccttgtacagtgctgggattacaggcgtgagccactgtgcccagccttttctttcttttttttttttttaattaaaaaaaatcctggctgggcacagcggctcacgcctgtgatcacagcactttgggaggctgaggcgggcagatcacgaggtcaggagatcgagaccatcctggctaacaaggtgaaaccccgtctctactaaaaatacaaaaattagccaggtgtggtgacaggcgcctgtagtcccagttactcgggaggctgaggcaggagaatcacgtgaacctaggaggcaggaggaggcggagtttacagtgagcctagattgcaccactgcactccagcctgggcggcagagtgagaggccgtctcaaaaaaaaaaaaaaaaaaaaaatcctgatcctgcctcttcagatagttttaactgtgatggagaaaatttaacagggtaagtggagagcaaatggctgatggggcaagatggcggtggttaccttagctttgatggtcagggaaggcctcccaggcctctttgaggagtcatgtgaactgataccttaatgagcagtggcactggctatgccgaaagttgaagaaagaacattccaggtagagggaacagcaagtgttaaggcccggaggtgggagtgagtttgctacaaagagtatcagtttgactggagaagagttaattcctagttttcaagttgatactactttaattttttttttttttgtggcagggtctgctctgtcgcccaggctggagtgcagtggcatgatctcagctcattgcaacctctgcttcctgggctcaagtgatcctcctgcctcagcctcccaaggagctgggattacaggaatgtgccaccacacctggctaatttttttttggtacttttaatagaggagacaggttacaccatgttggccagggtggtctcaaacgcctgacctcaggtgatctgcctgcttcagcctcccaaagtgctgggattacaggtgtgagccactgcagccggccacattttttctattttttgtagagacctgttttgcccaggctgatcttgaacttctgggctcaggtgatcctccaccctcagtcttccaaagtgctaagattacaggcacgagccaccatacctggcctacttttttataaaataataataatgatagcagcttacctggtgcttactctgtgctagatgcttttctaagcatttcacacattcctcagttaatcctgacagtagtccagtgaagtaattaacttgatcaaactcattttacagatgaggaaactgattccaccctccatgctcttcacctgcattctaaactcttccagggccctccttaccaggcagaggcaaattgaggaagtggacacagcatttcctttccttgttgtttgacatgcaaagcactttagactatatttagtacctaattgatgtggcagcaggggccgcctgggatgttgtggcatcatttttgctctcaatgagacacgatagggatggtttggtggtggtttcaaaactaaagaccctccagcagagcctgtcaagtaaaacaaggttgactgcttggttgccataccaggcacaggttagcatgaaacaaagtgtagtgtccaaggagagggagcagggtgtctcctttgggtgagctttgcaaggggacttgggacttggctggaaaaggtgtttttttttgtttgtttgtttttgttttttttgagtcagaggctcgctctgttgcccacgctggagtgcagtggtgtgatctgggctcactgcaacctccgcttcctgggttcaagcgattctcctgcctcagcctcctgagtacctggagttacaggcgcccaccgccactcccagctaatttttgtatttttagtagagatggggtttcaccatcttggccaggctggtctccaactcctcacctcaagtgatccgacggcctcagcctcccaaagtgttgagattacagatgtgagccatgcacccagctggaaatggtgttttaagcacactagccatgtgggctgttaaagtatcatactatagcccatcaactaagacaatgattcttggacctgtaagggccccaggtccctgctccggcatcatgacctgtgtgcactttgatttgctgtagcgtgggcgtattttgaatgaagggtagccctggttagatgtgaggacagtagtgggtgcttttaagactaaaaatattgggtgggcatggtggctcaggcttgtaatcccagcactttgggaggccgaggtgggaggattacttcagaccagaagttcaagaccagtctgggcaacatagaccccaactctgcaaaaaaaaaaaaagtttttgtttttgagacagttctcactctgttgcccaggctggagtatagtggtatgatcacagctcactgcaacctctgcctcctgggttcaaatgactgtcctgccttagcctccacagtagctgggattacaggcgcccaccaccacacccggctaatttttatatttttagtagagatggggttttaccatgttggccaggctggtctcaaactcctgacctcaggtggtcttcccgcctcagcctcccaaagtgctgggattacagacgtgagccaccgcatctgacctcatctctgcaaaaaatttttaaattagccaggcttggtgatgtgcacctataatcccagctactcaggaggctgaggtgagaggatcacttgagcccaggcactaccacaccttgagcccaggagatcaaggatacagtgagctatgatcacaccactctgtgtctaaaaaaaaaaaaaaaaaaaaaagactgaaagtatggagagcatctttcatctgtccatctgtgaaacatttcttcacctaccctgtgtgtcagggtccatgcttgacactgacagtataaagttgaataagacactggttctcaaaagcccacaacagtgctgtctgttagaaatataacgtggggccgagcgcggtgactcatgcctgtaatcccagcactttgggaggctgacgcgggtggatcacttgagttcaggagttcgagaccagcctagccaacatggtgaaatcccatctctacttaaaatacaaaaattagctgagtctggtggcatgtgcctgtaatcccaactactcgggagacggaggcagagaatcacttgaaccctggaggtgacagttgcagtgagccaagattgcaccactgcactccagcctgggcaacagagtgagactccttctcaaaaaaaaaaaaatgtgggtcactgatgaggctcatataggtaattaaaaattttctagtagccatattttgaaaagtaaaaggaagcaggaaagtaattttaatgatatattttatttcatctaaaacatcatttcaacatgtaatcaatatagaaattattagtgagctattttacttccttttttccacattaagcgtttgacatacaatatgtattttacactttcagcgtatctcagttggtaccagccatgtttcaagtgctcggtggctacatgtggctaatggctaccacatcggacagcactggccgagggtatgagattcacgtgtaaatcaaaggtggtagttcagtgatagatctgacatgccactcctgttttatcttggcggagaagggcagatgtatgatgaaaagcaggtttatcacaagcagttatagctaaccaaagagctactgtccatcaaacttgctgtatgtgcctggcactgtgcttagtgttggtgggtgttgcctgtgttcggaggtgccagggactacagttattcccatttcacagatgaggaagctgagataaggcaatgagaggtcacttgctcaaagttgggaagtggcagaggcagcatttgagctcaggtgcagagtgtatacttttaaacctgttttatatgctgtattggagggtgtttaagggggatagggtctgagttttgagcaatgaaaaccataggagggacttgttgcacaaaatcgattctgaggccggtcgtagaagatcatacctgtaatcctaacattttgggaggcccaggcaggaggattgcttaagcccaggagtttgagaccagcctggacaacaaagcaagactccacctctacaaaaatttaaaaaattagctgggtatggtggcttgtgcctgtggtcccagctacatgggtggctgaggtgggaggattgctttaggccaggaggtcaaggctgcagtgagccgtgattgtgccactgcactccagcctgggtgacggagaaagaccctgtctcaaaaaaaaaagaagtcccagtttgtcagcattaatctctgggtttacattggtgtcggtgtgctggtttgagacctgaatgattgagaggtccactccttaaattgacctctaggtttgctggaacctggaaccttacctcccaggaaagagaggggtctttggggagttgggaggagggtgagcagggggactaaggaaggcaaggaaaggtcttggcgtgtttgaaagctcatttctttgttttttgtttgtttgattgtttgtttgtttttgagacagggtcttgctctgtcaccaggctggagtgcagtggcgcgatcttggctcactacaacctccacctcctgtgttcaagtgactctcctgcctcagcctcccgattagctgggactacaggtgcgcgccaccacacctagctaatttttgtatttttagtagagatggggtttcaccatgttggccaggatggtctcaatctcttgaccttgtgatccgcctgcctcggcctcccaaagtgctgggattataggcatgagccagcatgcccagcctgaaagctcatttctaaattgctgctttggggccaggcctggtggcttatgcctgtaatcccagcactttgggaggatgaggagggcggatcacctgaggtcaggagttcaagaccagactggtcaacatggtgaaatcccatctctactaaaaatagaaaaaattagccaggcatggtggtgggcacctgtaatcccagctacttgggaggctgaggcaggagaatcaaacgaacccaggaggcagaggttgcagtgagccaagatcacaccactgcactccagcctgggcggcagagcgagactcggtctcaaaataaataaataaataaataaataaataaataaataaataaataaacaaactgctgctttggacatgaaacctgttgtgtcgctgactctggccctcattgctgtgtattctggtgggtgctgtgggctctggtggaagcaacagcagagcttagcttgtgaatgtgtcttacccttgctgtgctccaaagacattgccagtggatggggtgtggggaagggacatcacagtggtttcctctgtcaactctatgagagtcgtggttctagactttttggaggtgtcaggtgcaggttgaatcctggccttctacctaaacagggcaggtgctggagattctcagcttgttcctgtccccagatggtgctcaccacacttatctccaactgctggacagtgcctggcatgtgagagatgctcagtaagtatctgttgaattaatgatacgagccagcattcactgagctcttactatgtaggaggcactgttctgactgcttctcagctaatatcttattgaatccttagaaccactccttggggtaggtactgttgttattaccatgtctcgtaagaggaaactgagttacagagaagttcaagtcacagagctggtgagtctcaaattcaggattcctatgcaagtcactggctccagagtctaggctcttaaacactcactgtgtggtctttcgatgaacagacagacgaacagatggggcagacaagcaggaccattctcacttgttccggcctcctcactccacacgtggtctccccctgttttgggggagccccacaacagatcccaggcccctttgggccctgaggcttttttttttttttttttttttgagacagagtttcactcttgttgcccaggctggagtgcagtggcgcgatctcagctcaccgcaacctctgcctcccgggttcaagcaattctcctgcctcagcctcccaagtagctgggattataggcatgcgccaccatgcctggctaattttgtatttttagtagagatggggattctccatgttggtcaggctggtctcgaactcccgaccttaggtgatctgcccaccttggcctcccaaagtgctgggattacaggcatgagcgactgtgcctggctgggccctgaggctttaatacccctctggccagtgcttcttggtttgtaatttttttttttttttttttgagatagggtctcactctatcacccaggctggagtacagtggcatgatcatagctccctgcagcctctacctcctgggctcaagcgatcccccatctcagccttctgaatagttgggactacaggtatgcacaaccatgcccagctaatttttaatttttttgtagagatgggatctctctatgttgcccaggccggtcttgaactcttggactcaagcgatcttccctttttcctcccaaagtgttgagattacaggcatgagcccaccatgcccaacctaaaaagtccttatctataagatgctcatgctgaaatatctatgattaaactgttaagatatctcggatttccttcaaaataatatagacaggcagagagtgcaggggctcaagtgtgcatgggtgaataagagatgaaataagattgtctgtgagtggaactattgaagccagacaatgagggcttattatactctttttttgccttgatgttttgaaatgtatcatcatgagaagttaaaaacaagtacaacaaatttcacccagcatttgtgtatttcaagctcaagtgtacatacaggggaattccctgcctctgctcagtccacttatataatacaaatgtttgcttttttcttttttttgtctctattatatgagccaatacttggcccaaggctttggaagcccctttgataaagccgtgtctggcagcagtgggaacacccggccaggccccagcagccctggcttctctgagcagcgaacaccgtggcactggccttcgagtcagtttactgaggtcccttttccctgagatctgtttccctctagcacctgcctgtggggcccctcccacattttttccaaggacttgtttcaacaaaaagcctcagaccctcccctcaggacagacgtacacagatcttctgacacccggccttcctctggtgggtctttgttgaggccccacacgaaccggaatccagtctttggtgtgcccacagcaccgcggcaggaggcaggaaacgtgcccctttccagttctgactctggacaaaagaagaaaaagggcaagatgcagcttgtgacagtgcctgggacctgatggtatttctaatcaagctagcagctacaacgcctttacggccggccggcgtgcgctccccgctcccatcactgcatttgtgctttgggggtctggaacaacagcacatgagtatgtggtaaaattcttatgcggaagtggcaggaaaagagggaaacgtttgggggcttctcctgatggtgtgctgcctggtgggtagagatggttgatgggaacaggagtgctggttggtcagatcctgccagtgctggcgccgtttgttgcatctgatggtgagctctttcctctggtgccccgtttttctatgctgtgctgttggtttgcagggaggaagacagggaagtcctgcaccccctcaagcttccataaacttccacccccagcaccatcttcatctctgtcctttctttttctttctttttttttttttttgagacaaggtcttgctctttcacccagcctggagtgcagtggcacgatcacaactcaccgcaacctcgaactcctgggctcaagtgatcctcccacctcagcctcccaagtagctgggaccacaggcatacgccaccacgcctggataattttttttttatttttgtggaaacaggttcttgctatgttgtcgtggctggtctcgaactcctggcctcaagtaatcctcttgcctcagcctcccaaagtgctgggatcaaaggcgtgagccaccatgcctggcctgtttttctttccaaggcaccttttgcagttcttttagtagagaggctttcaggtgagtctagtgtggagggaatgtcatgagctctgtcttcagtataggtggcttgatttgtgtgtatttcccagtgtggactgcacgttggatctgagggcagcaaaccccaaatgctgatggcgtgtctgattttttttattttttgagattgagtttcgctgtttcacccaggccggagtgaactggtacaatctcagctcactgcaacctcggccccaccgggttcaagcaattctcctgcctcagcctccctactagctgtgattataattgcctgccaccacacccagctaatttttgtgtttttttagtacagacggggtttcgccatgttaacaaggctggtcttgaactcctgatctcaggtgatccacccacctcagccttccaaagtgctaggattacaggtgtgagtcactgagccctgccttgatttttattttattttattttgagacagagtcttgctctgtcgcccaggctagagtgcagtggtgcgatcttggctaactgcaatctccatctcccgggttccagcgattctcctgcctcagcctcccgagtagctgggactacaggtacccgccaccgcacccggctaattttttgtgtttgtagtagagacggggtttcactgtgttagccaggatggtctcgatctcctgacctcttgatcagcctgcctcggcctcccagagtgctgggattacaggcgtgagccactgagcccggccttgatttttaaacttatcaagtcctcagtgaggggagcactgttctagataccagggtgcagccatgaggaaaacagacaagggttctcacccttctggggctcaccttcaagtggaagagtcaatcaacaaacaagataaagaagtaaaacacggctgggcacggtggctcatgcctgtaatcccagcactttgggaggccaaggcaggaggatcatgaggtcaggagatcgagaccatcctggctaatacggtgaaaccctgtctctactaaaaatacaaaaaaaaaaaaaaattagctgggcgtggtggcgggcgcctgtagtcccacctactcgggaggctgagacaggagaatggcgtgaacccgggaggtggagcttacagtgagccgagatcgcgccactgcactccagcctgggcgacagagcgagactccatctcaaaaaaaaaaaaaagaagtacaacacgcaccgtgtcagttggtgataagtgcgagggagcagaaattaaacaggcaaagggcctaggaagcagtcacgcatggcttcacagtggggctgtgttctgagaaatgtgttgttaggctcttttgttgtgtgaacctcatggagtgtacttgctgcgaagctagatggcacagcctcctccacacctaggcgctatggagtaggctattgcttctaggccacaaacctacacacatgtgactgccctgaattctgtgggcagttgtaacacaatggcaagtatttgtgtatctaaacatagaaaaggtacagtaaaaatatgatataaaagattttttaaaaggtgcacctgtacagggcacttaccgtggatggagcttgcaggactggaagttgctccaggtgagtcagtgagtgagtggtgagtggatgggaaagctaggacagtactgtacaccactgtagacttaacagacacggtacatttaggctacactaaatttattttaaaaaatgtttcctcaataatacattaaccgtagcttactgcaacttgtttactttgtaaacttctaaatttcttaactgtttgggttttttttttttcttttttttgagacagagtctcgttctgttacccaggctggagtgcagtggcacgatcttagctcactgcaacctctgcctctcgggttcaagcgattcttctgcctcagtctccccagtagctgggattacagacaccttccaactgtaatctagtttgtttgttgttgttgtttttgtatttttagtagagacagggtttcaccatgttggccaggctggtctcgaactcctaccctctggtgatctgcctccctcggcctcccaagtgctgggattataggcatgagccgctgcacctggccttgactctttggtaataccacttagcttaaaacacaccttattcagttgtacaaaaatattttctttatatctttattctgtaagctttttttctatttttaaatttaaaatgttccgtttttatttttttgctttctgagctgcttttagtaaaaactaagacacaaacacatgagcctaggcctccacaggatcattagtatcactcttcctcctccacatcttgtcccactggaaggtcttcgggggcagtaacacacgtggagctgtcacttcctatgataacagtgccttcttctggaatatctcctgaaggacctgcctgaggctgttttacagctttttttttttttttgtatataagtagaaggagcacactctaaaataacaataaaaagtatatatacagactggccaacatggcgaaaccccatctctactaaaaatacaaaagttagctgggcatagtggcaggcgtctgtaatcccagccgctcgggaggctgaggcaggagaatagcttgaatccgggaggcagaggttgcagtgagctgagattgcgccactgcactccagcctgggtgacagggctagactctatctcaaaaaaaaaaaaaaaagtatatatactaaatatgtaaaccagtaacatagtcatttattatccttatcaagtgttatgtactgtacatgggctgggtgtggtggctcacgcctgtaatcccagcactttcggagcctgaagtgggcggatcacctgagatcaggagttctagaccagcctggcccacatagtgaaaccctctctctactaaaaatacaaaaattagctgggcgacgtggcgtgcacctgtaatctgagctactcaggaggctgaggtaggagaattgcttgaatccaggaggcagaggttgcagtgagccgagatcacaccactgcactccagcctggggaatagagggagactctgtctcaaaaaaaaaaaaaaaagattatgtactgtacatgattgtatgtgttacattgtcttttacgtgactggaagcacagtaggtttatttacaccaacaccacgacaaacaggtgaataatgcatggctctccgacctccccgtggctcatgtcactaggcaataggaatttttcagctccatggtcgtcttgtgggaccacccttgtaaatgtggtccattgttgactgaaacagtgttatgcaacacatgactgcgttaaggtggagggtgttgaaattttgggaagggtggccagggatggcctccttgggaaagtggccagacctgaaggaggtgagggagtgggaacagccagtgcaaaggccctgaggtgaggggcctggtaagattgaggcccacatggctggagcggaatgagcccaggagagtgggagggatgagggtagagaggagatatttgcagatctcttagggtcctgcacaggtttgtcttttctctgattgagaaggttaagatttttcagggttgattgatttattacttttttttttttttttttttttgagacggagtctcactctgttgccaggctggagtgcaatggcccaatcttggctcgctgcaagctccgcctcccaggttcaagcgattctcctgcctcagcctcctgagtagctgggactacaggcacgcaccaccatgcccagctaatttttgtatttttagtagagatggggtttcaccatgatggccaggatggtctcaaactcttgacctcgtgatccaccctccttggcctcccaaagtgctgggattacaggcgtgagccattgcgcccggccgatttattacacttttgaaaagtttgactagtgaccacatgtacaaggaaccaaagcaacaaaaatagggcacccagttcccttcccaagagaccaccacaattccagtttcctgatggtgaccagttccttgacactacattatctgagtgagtttcctgtcttgtattaggttggactgcctgacattgtgctttcgtgggtcaagaatggttgaatattggcaattttatgaggttcagcctaacagcttcctttcaggaacatgaggaatttggccaatcctttcttgctgtgagggttggtagtcctcccccgattcctcctgcatctcaccatcctctttcagtgacaggcccaacagtgcctgtaacaccagggcgtgaaaacccctgccctacttgtggcctcaaaccagggcttgctattaagcccagcaagaggctgccccttttccacggggacctcacctggcttctgatgttcgtcactttggctttctgcgtcttggtgccaccagttttgaaatcacagctcccagagggaggggcacccgcggactcttgctgggtgtttggtgtgactcacatggtgggggtgctctctggaacccgtgggcattctgcatcagtcacccatcagagtagctggcagagcacccagcttgaggtgtctgtgggaatctctgcggggaccaggtggctcaggcttggggagggggcctgaggagccgtgcacctccctgtagcgatgggagacttgcaagtcgttgtggaaccagggcactggcctcggtcctgtgggagcgggtgggggtgaaataaccttaaaggagatatggcgccaactttggaagagctcagtcgggaagttgtgtcagttggtaagcctttggctgcaaacagtagtaacagcatcagcagcaacaactgcagcagcaagtaggcaatgtatgtagcgtctgctgcatgcaagacactgtgccgggcccttcacatgaagccactcctttaagcctcccgacaaccctggaagatattattctccctttgcagatgaggtaactaaatttgaataacttgttcaaggtcaggcagctaaaaaaaggtggtggcatgatttttttttttttagattcagagggtacatgtgaaggtttgttacatgagtatattgtgtgatgctgaggtttggggtacagatcctgtcactcaaatagtgaacagagtacccaataggtagattttcttttccttttttttttttttttgagatggagtctcgctctgtcacccagggtggagtgtagtggcgcaatttcagctcagtgcaacctccgcctcccgggtttaagcaattctccctacctcagcctcccgagtagctgggattacaggtgcctccaccaaccatgcccggctaaacttttttgtattttttagtagagattggattttgccttgttggacaggctggtcttgaactcctgacctcaggtgatccacccaccttggtctcccaaagtgctgggattacaggcgtgagccactgcgcctagcccccagtaggtagattttcaacccttgccccattccttcttggtttttggaattctcagtgtctgttgttcgtgtgtgtgtgtgtgtgtgtgtgtgtgtgtgtgtgtgtgtacgtacccaatgtttagctcccacttagaagtaagaacatggggtgtgtgtgtatatgcaatgtttagctcccacttagaataagaacatggggtgtgtgtgtgtgtgtgtgtgtgtgtgtgtgtgtgtgtatgcaatgtttagctctcacttgtaagaacatggggtgtgtgtgtgtgtgtgtgtacgtgtacgcaatgtttagcatcccacttagaagtaagaacattggatatttggttttctgtttgtgcattcattcacttaggataatggcctccagctacatccatgttgctgcaatagacatgatttcattcttgtttaatggctgtgtagtattccatggtatatatgtaccacattatctttgtccagtccgctgttgatgggcatccgggttgattccctggctttgtgggttgattcacatgctatcgtgaagagtgctgcgatgaacgtaggagtgcaggtgtcgtttggtagaatggttccttttcctttgggtagatacccagaaatgggattgctgggtcgaacggtaattctatttttagttctttgaggaatcttcaaactgctttccccagtggctgagctaatttacattcccaccaacagtgtatcagcatggtgacgtgatttggattcaggcagtctgactccagagctgtatcttaactctaaagctctgtgtgctactgcagtggttttcaaacccgagcaagaccaggtgtggtggctcacatctgtaatcccagcactctgggaggccgaggcaggtggatcatttgaggccaggagttcgaggccagcctgggcaacatggtaaaaccccatctctactaaaaatgcaaaaattagccgggtgtggtggcacatacctgtggtcccagctattcgagaggctgaggcaggagaattgcttgaacctgggaggctctgagaggttgcagtgagccaagatcatgccactgcactccagcctgcgcaacagaatgagtgagactccgtctcaaaaaaaacaaaaaaccctagcaaggatcagaatccccagagggctaggtaaaacacagattgctgggccccatctgattctgtaagttcctgattctgtaagtctagcttgagaatttgcattttgtggtgacactggtgcccctggtccaggaagcacgttttgagaaccatgagctactgtaataggaagcccaaatgaaattggcctgaaataacgagatttatgatctcatataacaaagaagcctgtaggtaggcagcacagcagcacaggagttgactaagcagttccacaatgcctgcagggaccccatccctctccttcaagccactctgccatccatggtgtgtctcctgtgtccctaggctccctgcatggccacaagatgactgccaaggctccagttggcacacactgacagtgccacatccagcagcagaaagagggcatctctcacttgctgtgtatctctttaagagtgaggaaacctttcattgattccctgcctcccagatttccctcatatctcattggccagcatggtgatatgtgaccctgcccagagaaaccagccaagggccaattaggattgaccctctggggctggggctggggctggggctggagccggggccagccttacctgaagtaggtagcacagggaggagagtggctacaggaatgaaatcagagtaccatttaggaaaggactgggaaagggggagggatattgggtaggcagacaattggttttgctgcagaaataagtggaacacagggaaagcataatgcccatgcatttttgtcatcgtgcttaccagctttgttttgtaattacctgaatcaggacttagctttttgttctctaatcatgcccacctttgaaactgtgcacaaagtcccagtaccacaagaactctgaatcttgttggaataccaagtattctgtctggcaattcagggaaacttgagttgggtgatgaggcagcagtctgaaggttagagtgcgaggtctttgagagcactcactcactctgcccagaaacacctgggtctcacccatctctctgctcctgactccctcccccctcctcctacccttccttgcaaaggctgtttccccctctgagggctgttcttggatgaaaggagaggatgccagtcaagtgcttacccccaggggccagcgcatggtaagtacttaagaacgtggcctctgctattaacatattaaatgtgactttttatgtatgtatgtctgtatctatgtatgtatgtatgtgtttgttgtttttagagacagtcttgttctgtcacccaggctagagtgcagtggtgtaatcatggctcactgcagccttgatctcctgggctcaagcaatcctcccgcctcaacctcccatgtggctgggaccacaggtgcatgccaccgtgcctggcaaattttttttttttttttttagttggagtctcactctgtttcccaggctggagtgcagtggcgcgatctcggctcactgcaacctctgactccctggttcaagcgattctcctgcctcagcctcccgagtagctgggactacgggcgcccgccaccacacccggctattttgtatttttagtagagacggggtttcactgtgttagtctcgatctcctgacctcatgatcctcccaccttggcctcccaaagtgctgggattacaggcgtgagccaccgtgcccagcccatgcctggctaattttttaatcattcatagagacgaggtctcactttgttgcccaggctggtctcgaactcctggggctcaagcgatcctcccacttcagcctcccaaagtgctgagattacaggtgtgagccaccgtgcccagcataaatgtgacttataataaatattttataatcctgcacccccttaccaaaaaaaatctatgaagagtgaccatcccttttgcagactgaaatttcctgaggatacctgttgctactgctcgtggccacactgtaaagccattgccctttgagattgcaaagggctgaggaatgcagtgtgggctctgagccagactgctgagtgcaagttcttgatccatcttgggctccctgttttactttgggcaagccacttagccttgcatgtcttagtttccgtatctgtaaggtggagctggtaatggtactgtcctcctaggttgttgggaggattcgaatgcatcaaagcacgtgacatgcttagacacccctcccccccaacccccaacagcacccgacccaaagcagcactcatacaatatgtatcagctaatctttgaatattctgtgccagttcattcacaggggactataagctccctgtgggcaggatttatgtggtttttgtttactactgtgtcccagtgcctgactcagaatagacattgtttacatttgtgtgtgtggatgaaaagaaggatggtaagagcctttcttaatttcttttccttcagctgcctggaatttaaactctgacctgagctgattactcggtattttgaaggaataaagtggacctgactgactctgagggcagcatgtgataagtgcagctgattgttgagcatttttgtgagccacaagcatagtgctcaccataaagatctcacttggccaggcacagtggctcatgcctgtaatcccagcgctttgggaggctgaggagggaggatcgcttgaagctaggagtttaagaccagcctggacaacacagtgagacccttgtctctacaaaaataataataaagctctcactgactcttcatcccatttcatagatgaggaaactgaggcccagtgggagcacctgcttcttcttacaagaggagatctaaagtagtggttaaggccggccgcggtggctcatgcctgtaatcccagcactttgggagaccaagtcaggtggacctcctgaggttgagagttcaagaccagcgtggctaacatgttgaaactccgtctttaataaaaataaaaaaaaaagtagctgggtgtgatggtgcacgcctgtaatcccagctacttgggaggctgaggcaggagaatcccttgaatccagaaggcggaggttgcagtgagctgagatcgcatcactgcactccatccagcctgggtgacagagcaagactctgtctcaaaataaaataaaataaataaataaagtagtgggtaaaaactggaaccttggagctcctctgcttgggttagatccccaccccagcactttcttcctgtgtgacctccagcctatgacttattcgttgaacttctcatctgtaaaataagaatgctgatagttcctccttagagggtcgctgtgagggttaggagagagaattcatatgtagcacttagaacagcgccttgtgcagtgagcattccggttgtggttgttattattagccagccaaagccgttcagttgtgcttccaaagctggctggaagagtccagcgaccgtgtttaatcattaagctgcattgcctctgtgagctagtgcctcctctgcacgggccaaggagcccgcctttagattgtacggttctgaatgaagcatccaggcgcaagctcagggcaggggacggtgtgggcacaagtccagccctggctctgtcagtgaacaggtggcctgtgcctgaatccgaggtaataggcgagccgcctttgttacctttgagctttctttcaagcccattcagactcctcagaccacgtgtctgatgagtaaggaggccttttctttccctcccccaaagggaatgttggcaaaacagctttctttgggaacgcgcctgttcacgacgaccagccatctcctggggaactccggtggctggctggcgtgttcctgcggctgttgaataagtcgctgttaggagctggcacggcaggttcccgtttccgcattccaggcacccacagcgggctgggggcgggcaccactgaggtcggcctggagagccaaggcaggtggcctcgccctgggaggaccagggacaggaggagtccacctggggctcccctgacagccacctgcccactttgtgatcagagccgtgttcggggagtctttcaggtgagcgatattcattaaatttggcagtgacttgcagagaaagttcatcatgtttcttcctctccggagttagacagttagctttttttgttttctctttttttcccccctcttctccctgaaatgtttacctgtctgctcctaactgtgaagaaagagtgggccgggtgttgacggactgagaaaaatggaggacatttctcccaagagaaggaatcggtgactcttttagtgagttgagctcctgctggatgcagacttctgtgccggggctgggggcgatcccagcctggtgtagatgagctctgtggtctcgcctgagtccgctttcctctctgggcctcagtttcctcttcttgtgaaatgggaactagcagcagtgcccaatgagtcatctatgtaaactgcttcaagcctgggcactgagcggtgctcaagtcccccctccccaaccccaggcccccattttccctgtgtgacctcatctgtgacctctcagctgcttgcttgctgtaccccagctgcactggcctcctgctgttcctccctcggagactttgccctggctgttccctctgcctgcaacacttcccctagaattccccagcgccgcctccctccctccttccctcaagtctctgttcagatgtcaccttctccatgaggcctctctccttattaaattgcaccttctccctcaccctcgcccttactctttgctttatttttcttcatagcatttacttccacttgacatattttgtctatgctctgcttcccagctctaggctccatagaagcacaggcacttttgtgtccatccttgtagaaccgttcctggcacgtggtagatgcgggctaaattgtgatatgaatgaatttatatcaggtgcaacatgatccaaggatgggtggccagccccgtttggggtttgaggagggtgtcagcttttccaggaacctgtggctgtgggtgaggcggcatgtgcagatgcctccccctggtcacccagtggctctctggcacctgcctgcagcatccagccctctgccttcctgtcctgcaacccctgcagtctgtgcagcccaggcctggtagtgactcatctgggcagcctgggtgcctgtggcatggaacaggaaagcttggcctagtaagtggagaggatgtcaggttcatttaggtggagaagactgtgtggaagataccacccatatacacacatctcatatgtatctccagcccctgcttgctgttcctgcagggggaggccagggagtgcctgggaagtagcaattaaccagccaggcacagttgagccatctcccctgctttaatgggtaataattcttgctctggggctgaacaagttttaattaaatggtgagcgcgaagaatctgaccgtgtaatagctgacacgtcctcatctattttctagctcccggtgtcagcaattgattctgtaaaaatatcctgggcagggcttccctgagctccatgagtgaggtcagtggccttcttggatttctcccagcatgaggcaccaggggactgaggtgctgatggacttcgcgccgctgtagcatacatcatcgcatgtcaggacctgctgctattttaagaatgtgcagagcaggagggaagctcttctgcaacatttaacacatatgtcccttgagctcccagtgcgggagtttggggttgagttgaggactctcctattacacttatttcatgtaatgcctgagccccaacactgtgggcacagtagttctctgggccacaggttccttatctggaaaatggggataattaatagatgattaaacgagaagtcaaagtgagatcaggtgactcagtgctgtgtctagtgcatagatagcaaattagatttaagaaagacaattctttttaagaattcttttcaagcccctttttaatattttcggtctgtccttttttgtgcccacccccgaccctggttccacccctgtgtcagcatcctcccgcaatccttcacccatggtaacaatcaaggactgtatgtatctttccacatttttctccatggttatataatcctataggagataatattacacttattttcttgcattttgctcttctcacatagcagtgccatgtggaatgcctctgagtccttgcatagtgctgagatttgctctttttagtggctgcgtaacacacagtggtgtggatgcaccataattgatttggccaagacatcactgataggcattcccttttctcctagagtttttttttcccacaaattattatttttattgataaccttctttaattagattgcagatgtccaacctgtttggccaccttgttaagttctaggcctttgagaatgaatatgaagtaacagtagtgcaatgatgcctctcgtccagatagaagatgtatttttggagggttctcaccaagtccagcactgtgttgaaccaaaaagcattttttaaatgcttttttattattagaataattaatagattcatcacacttagccagattagttgtgtttaatgtacttattatgaaataagagtgaaaggacagttcatgttttttcatattaacaatcttggttggaaatcagaatgtgcaagagatttttgttgggatttgtgattgattgtgtgtttctttttcaggtggcactttagttagggactatgcttgtgttcaggaaacttgtacagcgttgtacccagatagagatttgttctagttgtctattgctgcaccacaagccacccctaaacttaaggccttaaaatgacagcagtttcttatttcttgtgaacctgtggttgactggggctcagcaggatggttcttctgctggtcttgcttggggtctgttatgtggctgcagtcagagggtggatggggttggaacattcaacatggctttactgaaatggcaccttgggaatggctgggtccatgtctgtccatagtcttgggacctctcctttcatgtggcctggccagcctgtagctggacttataacacggcagctgagggcttttgtgagccttcttaaggcatagatttagaactggctccacatcacttctacttcattctgttagttaatgtgagttgaagagtcagcccagattcagtatgggagggatatcacaaaacaagttccaggaggtgtggtccactgtgggcacctttctatcctggctaccatggggttcattttctcatgtaagaagtgcagagctcagcaggctaaggtgacgctcaccttaccctctctctgctgctccaggtcaccatccttagcctcatattcataaaatggttgctctacctccagcctgatatccttgtgatgggcaggcagaaccagggctctaaggaaaggagacagcacctgtatcaagaagccaaagccttccctgaaatctttagcagacgtctgcttgtgactatttggctagaactttgtgacatggccactccttgctgcaaggacatctacagtttttcagttgggcccattgccaccctgagcaaagggtcaataaggaagaagacggagagtggacatgttgggcattcacctgccagcactccatccagacagccacagaagtggtgggtaaacagagacagcatacattcacttatcaactgtttagtaaattcctggcatgggcagggcactgggcttctcccaaagactgtaagagtgtgcaggattatttgcagacattgaccagatcattgctgagctcacctctctcatatcagtgttcgaagttagtctaatgataagaatagtagccagtctcattaagggcttaccttgtgtagaggaactgttacgaatacttttcataagccaactcagtgaatcttcacagtggccctatgaaatgggcattgttatcaccccctcttctcagaggcagaaacagaggcacagagaggttcagtaacttgccatatttcctctgacaagggcatggtggagttgagatgcagtctctcctggtctggctctggaggcatgtactgaaccatttggctatactgctttggttaattacaggaaacatttcttgttgaaatgaatatgtaattgacagcagaataaaacatgaaacaaaaaccacttactactccatcccctccactcctgcttcctgcctcattggtctcatctgtcagtaacctagtatatattcttcctcacctctttctaaatgcattaatttttaaaatcttttgagagtctgggtctcactgtgacacttaggctggaatagaatggttggctaatttttttcatttgtttgtagagatgggatcttgctatgttgcccaggctggtttcagactcctgggctcaagtgatcctcctgccttggcttcccaaagcattggcattacaggcgtgagccaccatacctggcctgtattaactttttaaagatggcctttggacacacagaattggattaatcataatgcgtggtgcatgatacactggcatttttggtccatgaaaaaaatattcatctatcataatgaacagccgttagcccactgtttgcccaagaacttgaatattaccagtaacttacatgtacctatgtggtacttcccattcactttcctgcctgctctctcagaagtgaccaccatcttgaattttgtgtttattattctttgctttaaaagaatgatttttgaactttatcaaaatatggctgagtgtggtggctcatgtgtgtaatcccagcactttgggaggctgaggcagcaggatttcttgagcccaggagtttgagaccagcctgggcaacatggcaagacctcatctctacaaaaaaatttttaaaaattagccaggtgtggtggcatgcacttgtggtcccagctacttaggaggcttaggaggaaggattgcttgagctcaggaggttgaggctgcagtgagcctggttcgtgccactgcactgtagccagggcgacagagtgaaaccctgtctcaaaaaaaaaaaaaaaaaaaaaaagaccaggcacggtggctcacacctgtaatcccagcactttgggaggctgaggtgggcagatcatgagcttaagagattgagaccatcctggcctacatggtgaaaccccatctctactaaaaatacaaaaaaattagctgggtgtggtggtgcgcacctgtagtcccagctactgaggaggctgaggcaggagaattgcttgaacccaggaggcggaggttgcagtgagctgagatggtgccactgcactccagcctgggcgacagagcaagactccacctcaaaaaaagaaaaagaaaaagatatactgtacatagttttctgagacttgcatttttcagctaatattatgattctaacattgatttagactggtaccactgggactcatgcatttttatttactgccatgtgagtattccactggctgaatataccatgtttttgttttaggcatttccatgccaatggacattttgttttcagattttttgctgttcacaggctgctgtgaatattgttacacttcctggtgcacatggacaagcatttctttcaggtatgtactggacatgagatttctggattgtaggttgtgatcatctttagctttgccagatattactgagctgctctttaaacatcccaccaaggatgagtttcttttattctgtatccttgtcacatttggttttgtaaaacttttttacttttgccagcctagtggataggaaatgaaatctcattgtggttaatttacccctgaagactagtaaggcagaatatcttttcattcatgtttctccttctggatattgcttgctcatcacatctgcttctttttctttttttcttttttctttttttttttttttttaggtggagttttactcttgtcacccaggctggagtgcagtggtgtgattttgattcactgcaactgcacctgctgggttcaagcaattctcctgcctcagcctcacgagtagttgggattgcaggcacctgccaccacacccagctaatttttgtatttttagtagagacgggatttcatcatgttggccaggctggtctcaaactcctgagctcaggtgatccgcctttctcagccttccaaagttctgggattacaggcgtgagccacagtgcccggccacttttgcttctttttcctattgaattgtaggtgttctttatatactgtggctactaatcctggggtggcagcctatttaacctaataaaagtttatgatcctcgggtcatcctttctgtagttgttttctttcccctgctattctccccccaattccatgatacctttttgtgtacctccagctcacagtgatccactctttgaaacagtcctcaacttctgggcatttgtatatgttagtacagatgtatgactgactatacctgttctacccactgtgccgttgcattttggtatcagatgtatctgttaggattagtttcaactacaggctggccatggtggcacacacctgtaatcccagctactcaagaggctgaggtaggagaattgcttgaatccaggaggcggaggctgcagtgagccgagattgcaccatgcactccagcctgggcgacagagtgagactccatgtcaaaaaaaaaaaaaaaaaaaaaggattagtttcaaccgcatataatttagtttcaacaaagtgacagtggcctaagcaagatagcttatttctctctcacgtaaaggagccccgtaatagacaggcgagcctgtgttctcatcagggacccaggctgcttccaccttctggctccaccacctgtatcctgccacctcatggtatgagacagctgcccaagctctagccattacgtcccaggaggcaagtaagaaaaaaggagacttaaattgtacacagcaagtctgcttacacctttgcccagaatttaatctcagtactatatgtagctgcaggggaacctgggaaatgtagttttatttcccatggccttattcttagctaaaatttagatttgattgctaagtgaaaaggggagactcaatattggagtaggcagccggtaatgtcactagttctgaggtgttccctagtggagctgaaaggagccatcagacaccaggatggtacctgtagatgatgccctccccacttttggttctttgattaattacacagatatttatggagcacctgttttgtacaggcactattctgggaactgggaagagagtaatggaaaagcaaacggggtctccacccttgcagagctcgtattttaaaagagcagctagatagtaagcaagtcagttacttagtgcgtcagagataaggggtgtgaagaaaaataaaggaggctgggcatagaggctctcaactgtactcccagcactttgggaggctgaggcaggaggattgcttgagcccaggaggtcaaggctgcagtgagccgagattgcaccgctgcgttccagcctgggtgacaggctaaaaaaaaaccctgcctaaaaacaaacaaacaaaaaaaaaaacaaaaaaaaagctttacctcttactaactcatgaccactctgttttcttctatatccaccaccacccaccctctactgtattattttaacgctaaatagttgagtatctgcaagataaggattctttaaagacataatgagaagaccattttaatcatgacaataattaacattaattgcttacatcatctggtatccgcacagtgttaacatctcagatcatctcataaatatctttctagaattggtttgttccaatcaggacccaacagggctcaccattggagttggttcatctgcgtgtgaagcctcatttaatctatggcttctccctccctccagctcactgcaacctccgtctcccgagttcaggcgattctccacctcagcctccttagtagctgggattataggcatgtaccaccacgcccagctaatttttttgtatttttagtagagacagggtttcaccatgttggccaggctggtctcaaacccctgacctcaaaggatcctcccacttcagcttcctaaagtgctgggattgcaggagtgagccaccacacctggcttgatttttctttgtttttctcttgcagtttatatgttcagaaaggccatgtcatttgtcctgtatatgatcaggcctggatctgaccgatcatatccctgttgcagtgtttaacttattcttctatctctgtgtttcctataaatgaatcattggatttgcagagtaggtgaatttcaggtttgagatgtacacacacacacacatacacacacacacacacacacacacacacacacacactgtttcttttttggcaggcagggctagccgtcctcctaggtgttgctgtgtatccgttagggatgtaaagctgggggcccctttctgtattggtgttagtggccgtggatgaccattgctcagagccattatttcatttggggtgtacaaaaattgtgctgttgtaattctgtccacctcttcatttattagtgggactattcctctagagagaacctgcccctcatctattattcagttatcctgagggtactggctcttttgaacttttgtttgccttagaaatgactattgaacaattgggctggtggtttctaatctgttgtgtgttttttttttttttttttcctgcagagattcaaatcttccttgtttttatgttcattcatttgacatttgccggtctccaccactgctcataccctgtcctgagcttgccaataaacagatgaaccagtccagtcatctcattgtgtgggcacggctgctccaggccttacctttgaccgggtggggccttgcgggtgtttgtcgaagtaatgagactgtggacattcccatctttctctctctttcccctgtcgtgcattgtcagaccttatagtctttggtgagttcctgctctacgccaaggaattagtcctttatgcttggggcaagaggtttttgagtatttggatttcttctgatctgaaactccattcctagacaaaagaacaataaagggctctactccattgcagaggcaagccctggtaacctggccaggggcgagccctgaccccagccactgttgtctgggtcataaattcttgagagcagtagcacgcttgaaatcatttagatgctttgggatcagttattcattatattgcacgatatctaagggcctctttgctgctagagattacaacacattcctcctgggggcagaagatttattgtgcagtgatgtgcaaactcattcattcattccattgttaacttcttcattcagcaaatatttactgaacatcacatatgcttccagtgccggggacggagcccgataaggtctgtcctcctggagttcattgtttaggttgggggacacagtcaaggaagaagtaaacagattaataagataattccagatggggatgaataatgctgtggagtcaggaaagcagaatggcgagagagacacgcctggaagtagaagggattgtgggaggctggaaaactggggtcgttgggggagagcctcctcggggtggtgacatgccagctgagagtggagtggtatgcaaaggtgccagccttgtgaaagatcagggaagagctttcccagcagagggaacagcaggtgcaaaggcgctgaggctggaatgagtttgacgtgtgaaggagtgtggggtgggggtgggaaggagggggagggcaggagacgggggtggcgggggagcctggtgagggtgtgggtttgattcagagtgtcctcccatgccctctggctacggcgtggagcatagattgaaggtgggagtggaagtagggcagtgaggggcagcctgttttgcagtgaggagagaagtagagtcccggatgagagtggtggcaatggggacaagaagtgggtggcccaacagaacttgtttagggattggtcatgctgggtggtgagtgggttgaaaggtttaccagcgggttcaggctttggtctgcaggattttgtggtagtaaggatagccccagtcccctttaacatgggctgaggttttctttcaatttttgtatttttagtagagacaggttttccaggctggtctggaatcctggcctcaagtgatccttctgcctcggcctcccaaagtgctgggattagatgcgtgagccacacccagcctctttctctctctctctctctctctcttttttttttttttttttttgtagagacagggtcttgctgcattgcccaagctggtatcaaactcctggcaccaggtgatcctcctgccttggcctcccaaagttgctgggattctaggcgtgagtcactctgcctggccaagagctgaggttttctactacacacatctcgtctagccctcatatggtagactcttaatgcccatttcaaccccgaagaaactgaggcccagagaagtgaagtccttaatccttgtcacataggctgttggggctggattggaacgtggatagccccacccacagtccgaccacgctctcttcttctccctcactccaactacagctgttaattcatggtattgacacagcctgtgtccaggaggagccaaatgtcagtgtcatacatttctgaagtcaagaggggatcaaatccacatcagtggccttttcaccattcccactaacctggattccaacacaccttttatgacagtaattattacagggcagaaaacggggactttcgattgctgaccactttacacgaggcccagataaggtgtgcatctaggccctggactttgagccctgagcctgcttaactgattgggctgaaagtgttctcacccatcaaatcctccttatcaccttctccagaactccagctgtaaagggagctcaccactcacagggtgtgtgttgtatgtgacacctcagccagccaaatggctttacttggtgtcctctcagaagaggtgtgacctccttctcttagcgtggtctcctgtggaaagtcatgttgagtttggtgctgcctctgcttgcgtttaggcctcttgacaaggattgtatgttgatcaattttttaaaagtgtttttaaaaaatctttactgctttaaaatgtacagaagccacacgctggctgtaacccgttccaacagcagagcagtatgtagagaaagcatgggccggacacgcctgtaatcccagcactttgggaagcctaggtgggcggatcacctgaggtcaggagttcgagaccagcctggccaacatggcgaaaccgcatctctactaaaaataaaaaaaattagccaggtgcagaggcatgcgcctgtaatcccagctacttgggaggctgagacaggagaatcgcttgaacccaggaggtggaggttgcagtgagctgagatcgcaccactgcactccagcctgggtgacagagtgagactccgtctcaaaaaaaaaaaaaaagcatgaagatctgcttcattgtcttgacctagtggcctggctttgcccccaggtcctgcccagatgcatattaagtgcacacttccaggtcttggtctgtgcagtggattgtttgttaagagccagggtgcctgggttcaagtcctagtattgctgtgtactgactgtgtgaacttgggcctttacttaatctccctgtgccttgatttctccatctttaaaatgatggtgatgatcccaacctcataggcttttaaggatttaccctgttaatgtattaatatgtaaaagaatagtgcctagcatgtttgttaagtacaggtgatccttgatggggttatgttctgatgcacctgttatacgctgaaattacccttaagtcaaaagtgcattcacacctgtcatcccagcactttgggaggctgaggcgggcagatcacttgaggtcaggagttcgagaccagcctggccaacatggtgaaaccccatctctactaaaagtactaaattagccgggcgtggtggcaggtccctctaatcccagctactcgggaggctgagccaggagaatcacttgagccctggaggcggaggttggagtaagccgaggttgttgccactgcactccagcctgggtgatagagcgagactccatctcataaataaataaataaataaatgcattcaatacacctcacctttcaaacatcatagcttagcctagccttccttaaatgtgctcagaacacctgcattagcttatagttggggaaaaataatctaacataaagcctattttatagtaaagtgctgagtatctcatgtactgcttattgctggcctggaaaaagttcaaaatgcaaagtacattgaaattgcagccatttgtgccatggtaaagtcaaaaaattgcaagtcagagactgtctgtactcatgtcttaggttgtttttttttttgagacagagtcaaaactctgtcatccaggctggagtgcagtggtgcgatctcggctcactgcaacctccacctcccaggttcaagtgattctcctgcttcagcctcccggtagctgggactacaggcgtgtaccaccacacctggctgatatttttttgtattttttgtagagacggggtttcaccattttgcctagactggtctcgaattcctgagctcagcaatctgcccacttcagccttccaaagtgctagaattacaggtgtgagccaccgcgcccagccagctatttttttttattatacatctatgtgagtaccgcagtttgttttatagacatactctaggtatgccgtcctgcagattacacttgagtagtctagcttaagagatccccccgtgtctgtgggtcaaggtctgtggcattctttttaatggctacatagcattccactctatttgttgcctgttgttgaacatactggctgttcccatctttcattattggaactctgaacatctcacacacaaaaatcatttgtttgcttcttaagtttttcttgggacaaagtcctagagttgcaattcctgaaacagagtgtctatttttaaagacttgtggctgggcgtggtggctcacgcctgtaataccagcactttgggaggccaaggcgggaggatcacctgaggtcaggagttcaagaccagcctggccaacatggtgaaaccccgtctctactaaagatacaaaaattagcctggcgtggtggcaagcgcctgtaatcccagctactcaggaggctgaggcaggagaattgcttgaacgcgggaggcagaggttgcaatgaaccaagaatgcaccattgcactccaacctgggggacaacagcgagactttgtctcaaaaaaaaaaaataataataataataaagacttgtgatatttattgttgacttgtattccggaagggtccagtacaggagttctggtttcctggatcctcaccaacgctgggctcacactgcttctttccctccccacacttttttttgtgtgtgtgtgtggagatggggtcttgctctgttgcccaggctggtcttgaactcctggcctcaagcgatcctcccccatcggcctcccaaagtgttcggattacaggcatcagccaccatccatggcccagaatgctttttaatctttgctatttgggtaaccaaaagttaccaaagtaactaataatttacatttatttgatttctggtgaagtttattgtatatgtatctgtttattaatcatgtatttcctagttaattacctatttctctggggggtatttttatttcttgttaatttgtggaagatttctttacatgttgaagatatgaatcattttgttatgttgcaaatttatattcctaaattgtttatcttttagtttttttttgttaaacattcagaggcttcttaatttttgtgttgttagagctatttttcctttgtgttttttgttttgcttgttttatgtatgctttggctttcattttaggatgagataaatattttcttcctagttattttacggctttgtttttacatctaggatctgatatttattttggaattggttgtgagataaagatctagctcctgggccaggcgcagtggctcacgcctataatcccagcactttgggaggcagaggcaggaggatcacttgaggccaagaggccaggagtttgacaccagccttggcaacatagtgagaccccacctctacaaaaaataaaaaatctagctgggtgtggtggcgcacacctgtggtctcagctactggcaagactgaggtgggaggattgcttgagccctggagttcaagattatagtgagctgggattgcgccactgcactccagcctgggcaacagagtgagaccttgtctcttaaaaacaaatccgtccaggcatggcggcccacgcctgtaatcccagcactttgggaggccgaggcgggcggatcacaaggtcaggagatcgagaccatcctggctaacatggtgaaacttcgtctctactaaaaatacaaaaaattagctgggtgtggtggcaggcacctgtagtcccagctactcaggaggctgagacaggagaattgcttgaacccaggaggcagaggttgcagtgagccaagattgcgcctctgcactccagcctgggcgacagagtgagactccatatcaaaaaaaaaaaaaaagtccaactcccccacctcagtagtcaatgagttgtccctatcctactgactaaataatccgttctttcccactaatatgaaactcaaacttactgtgagccaggccctggtctgtcaagtttacctttctagtctcctgccgtaactcaatgaagcagattgataatattcccattcacagcaagaaaaccgaagcacaaagaggtgtcgtttcttgcgtgacatttcacagcttggatggggcagagcctggctggaaatattgcagatttatttaataaccagcccccttatttgtaatatgttttcagcagtttttcctgcagtttcttgccaaatctcccttttgtccacctgtaacagcctgcagcactttccctatgctggagttctatgttttaggcctgttctctgcctctgccctggccaagacttctgtggcaatgtcagatgccagtggaggctgctggcaggcgtggacgtctcagatgtctgatccttcaggagccccctccacggggccctggctaggcagtgaccaggatgtttctgaatccccttaagttaatggtggccacttaggcagcggaagtgtcatgaaagactcttctgtccccatggctgggccaaaccagggaagacgctgacatcaagcacaattgagaacaagcagcagtaggcaatgttctggggctattaattcatcctgggggaaaaaacctcacagtggattaaattggtttatgtaaagtgctgagaagagcccagcctgggcaacatgatgaaatcttgtatctacaaaaaatacaaaaattggctgggcatggtggcatgcacctgtggtcccagttactcgagaggctgaggtgggaggatcacctgagcctgggaaggttaaggctgcagtgagccgtgattgtgccactgcactccagcctgggcagcagagtgagacccggtcttaaaaaaaagaaaaaaaaaaaaagaagagtggttggcacatagtaaacactcacatacatattagtcattgttcctctgtttccaaaggtaggaagaaagttcccaggaggtgtgcttagaatgtgggtaggcagataccactcgggtatttcctgagcacctatgccatggcacacaagtgctggggccacagttagggctcaggacaggcacggcccccacgctcttggagctgacattctagaaggcaggtggatcctagatacaacagatacatgacgtaatgttatgtagtgagaagtgctagagattgagggaggctactgttttattagaagtgaccaaggcaggcctctaaagaggttgcctttgagtcaaggcctgaaagataaggagccagccgtggaaggcacattccaggcaggaccacagatgcaaaccccaaggctggagcttccagagcttgttcccagcaattcacagatgccactgtggcaggagggcagcgggggagaatggcaggagatggcatcagagagggagccaggtggaccttaggttcttttggttgaaaataacagaaacccaccttagacccacctaagcctcaaagaattgtgagatgcctcctgaggcctaggacttgcactgtctcctggcatcaggatcgataggcctgaggcctaggcgattttctgtctccatctcccatctctgtctcttctttatctctgctttcttctctctttgggtttctccaggcatttggccacctcattgctccttcttttatgggatttccaggtcgcaaccacagatggtcacctctcatccagtgagctatggctggagaataagcatggccatcccacccgtgcctgtgtacatgcacagttttcattcaaaggggactataaggccaggcacagtgactcacacctgtaatttcagcactttgggaggctgaggtgggcggctaacctgaggtcaggagttcaagaccagcctggccaacatggtgaaaccccatctctactaaaaatacaaaattagccaggtgtggtggcgcacgcctgtaatcccagctattccggagattgaggcaggagaatcgcttgaacctgggaagcggaggttgcggtaagctgagatcccgccattgcactccagcctgggagacgagagaaactctgtctcaaaaaaaaaaaaagttggagaggggactctaggaagcctgaaagacccactcccctgctgtcctggcctagggtacatttcccttttctcatatgaagcaacatcatatcatggttaagaacatggccacattggccgggtgcagtggctcacgcctttaatcccagcactttgggaggccaaggcaggcggatcacaaggtcaagagattgaaaccatcctggccaaaatggtgaaaccctgtctctactaaaaatacaaaaattacctgggcgtggtggtgcatgcctgtagtcccagctactcgggaggctgaggcaggagaatcgcttgaacccgggaggcagaggttgcagtgagccaagatggcgccattgcactccaacctgggcgatggagccagactgtgtctcaaaaaaaaaaaaaaaaaaaaaaaagagtgtgaccacattgtctggattcagagctctgccacttgctagctgtgtgaccttggactcatcacctcactcttggggctgcagttttctcacctgtaaaatgaggatgctaaagccttttacttcagggtgtggttcagagcattagacaaacttaggtaaaggactcagtctgagcctgatacacagtaagcactcaaagtattagttttcatcatcatcgttgtcatccttacttttccttcctgaggccggatggtgctctacagttcaagataggacttgggaataaagagcgtaggattgatctcagctctgtgaccttgcccaagtgagtaacagctttggtttcttcatctgcgtagtaaggacaagaaagagcttacagggctcgatcattggatgtacgtttgtcgtctgagatttggggcgactggaaattcaagagatcccaagttccctgctcagtgcagccccagctcctgatcacacttgaacgcgagctgatggcgggcttggttctagggcctgcctcgcctctgtcatgaaggctgcgcggggcccttctgtgccgagactggcgcttgctccccacaagcccgtctgctgctccctccgctgcgagccctcccaggtctgatccgcctgtccccagtaccccggcatgcggcacttttccttcttctcttgtgaaaggcagatctggaagaagcttctggggaaatgctgtgtttgtgtctggttatatctattccccagacggtgattcttaaacctggctgtgggttggcatcacctggggaatcttggtaacagttgggattctctggcttcactcctggagcatctgctcccgcaggtggagaggaagatcatctgctggtttggccgccctacaaccattcaccattcttttggggttttcctgttgggaactgctcttcctccatcccgtccgttcacttactgagaccgctgtgtgcaatttattatttaccccaggcactggggatatggcagggaatctggaatatgcccttgaaactggaattgtgtctgtccgttagatcacagtaccgtaaggctgtcactttctgatttttataattgtactgtgatccagagattcttcttaggaaatacccacatcttgaggggttacaaacaagagcaaattaactggaaaagggaagcaaaccagtgttggctgaacaaacatgaaaatgactacaatgtttatcttcagttttgggagaattgtcatgaagactcaaccacagtgtcatcctttgtacagaataggattctaatcaggagaccagtgctcatgtgcacagctttgagtgtgaagatctaaaaattttagttggtaggatgattacagattattttcatcttcctctttacagattattttcatcttcctctttaaacttttgtatatttttcacattttctagaaggaagttttagaaacagaagtgggaaaaaaaacaacttaaaaaaagccccgggccaggcgcagcggctcacacctgtaatcccagcactttgggaggctgaggtgggcggatcacgaggtcaggaaatagagactatcctggccaacacagtgaaaccccgtctctactaaaatgcaaaaaattagccgggcatggtggcgggcgcctgtagtcccagctactcgggaggctgaggcaggggaatcacttgaacccaggaggcggaggctgcagtgagccgagatcacaccactgcactccagcctggcgacagagcaagactgtctcaaaaaaaaaaaaaaaaaaaaaaagccccactgttgtggaatgtcctggtctacctggtttggacttagaaatgccttaggagtagcctgggcagttcaggtcattccttatcttcctgccatagggattggttcaaggaagggaggaggtgagtcagtccaatcagaattaagacaggtctttctctggagctcccaggaaagaagaggagctttcttcctatggaggtgccaagttgtagagtgtaagcttaatgctgctgggggcctggggaccatctttgctcagagggtcgagtggaaaggagatggaaataattcattacagacaaattctttgggtaactgaacttctcagtaatgggagccaaaacattggccctttttcccctcaagtcagtttgaattgggtctctgccacttgcaaccgaaagagtcctaagtaatacagtaattttagtggaccctagaatctatatttaaatttaaaaaattctctgccaggcgcagtggctcatgcctgtaatcctagcactttgggatgccgaggtgggtagatcacttgaggccaggagttcaaaaccagcctggccaacatggtgaaaccctgtctttactaaaaatgcaaaaactagccaggtgtggtggcaggcacctgtaatcccagctactcagggggctgaggcaggagaattccttgaacccgggtggtgaaggttgcagtgagccaagatcgtgccattgcactccagcctgaggaacagagtgagactctgtctcaaaaataaaataaaatataaaaataaataaataattctccagaaatgatttgtatgaatcagatatttgagaaccactttgctagactttcctgagtggcggttcttagctttatgtgatcaacagactggcctggggaacttgttaaaatacagcagctctgttccacattgctggagattctggtttggggcctgaggcctgggtatctgcattttgaacaccatcctgggtgattgcatacacttcagagtgtgtgtatgcacagaggattcttggccgggcacggtggctcacgcctgtaatcccagcactttgggaggccgaggtgggtggattacaaggtcgggagatcctggctaacatggtgaaactccgtctgtactaaaaatacaaaaacaattagccaggcgtggtggcggaggcctgtagtcccagctactcaggaggctgaggcaggagaatggcgtgaacccgcattctcagcttacaatcctatccatagagggggcccaggatccttctcaaatgaatgaaagtagagtttaagtctgcagtttttttcctctttggaaaaaaacattcctttcctgcccatgacccagccttgcacactggccgctaaacctggcgtatcgcatcatgtttcaggaggaatttggtcagatctgtgcactttattaggataatggttgacccagtgtgtacctccccaggtaactttggaaagagctggatagagttcatgaccaattcggaacaaagtctgctcttaggaggaattttgctaatagtgggaaatattcaagagggtaatcactgacttagttcaaggtaatttaaggtgaatgcattcctcatgtgtgtgtgtgtgtatgtgtgtgcatgcgtgccaaacttacttgaggtgaaggaggggcgaaagcccttttactcgaatgaaaggaaatcttttgaattgacctatcggttcagaaaatcccttttcaaatcttcccttgagcagctttgcttttgaggcccctgaaagctgggaaagaaggggctgtgaggcctgactgactcctcgctgctggctgtacccccaggcacgtgtgattttgccattgtctgaaatcttgctttccccagaatttgtgccccatgctgagttcctacagctcagccaccaggaattagggcatgggttagccaggattattcaaatttaatctgatcatcgttaaacatttttgcttgcatcctccccaaaagaattttgataagcccctgtatacctccttgtacactgtaaagctaacatctaaaataagcttatggtaactttaaatttgtcttatttgtgggagaagaaaatagtacacattttgaaggtcgaatgtaattgaaatattttatgatgtggttagataaaaaaaagtttttactaccttattgagtaaagtacacagaagctgaaagcaatcatgtaaatttttccctgggaattttttcttggtggatctagaaaaattcagtggtcctgaaaaatgttccctttgaacaaatcagagccactaacctatactgctttgacattcatgatcctactatggttcagaaaatcctatttttaaagcccagtttcatgtttggcagaaagatacttaagtcagggaaagacaggcaagtctgggggtttaagtagctttttattgttcactaaaggctacttccccgaaaccaatattgatgttgtgtgtttggagtcctggaggtttacacacctctcggtcgtgctccttgggaaaatgggggagtgcacaacagcgggtgggcagtggggaaggagacaggctggtttgcagccagatcagttttaggaagaggaacttgtggatgttgaggatctgaacattgcttcccttgaaaacactgttttcaagatactcctgtatctgttaagtttccgtaaacccctagtgataagcacatccaagcgtgaagcctctcggctttaagaaccaggcggtttcatatggagtgggaagtccagaggtgattaggttacagaagttgtcaccaccaccgcctgtatgtgtgtatatatacacacgtgccataaaagtcacccattcagaatatgcaattcaggctgggcgcagtggcttatgcctgtaatcccagtactttgggaggccaaggcaggcagatctcttgaggccaggagttcgagaccagcaaggacaacatggtgaaaccctgtctctactaaaaatacaaaaattagccaggcattgtggtgcatgcctgtagtcccaggtacttgggtagctgaagcacgaggattgcttgaacacaggaggcgggggttgcagtgagccgggatcacaccactgcactccagcctgggtgacagagtgagatgctgtctctcaaaaaaaaaaaaaaaaaaaaaggccaggcatggtggctcacacctgtaatcctagcactttggcaggccgaggtgggtagatcacctgaggtcgagagtttgagaccagcctgaccaacatggagaaaccccgtctctactaaaaatacaaaattagccaggtgtgttggcacatgcctgtaatccccgctactcaggaggctgaggcaggagaatcgcttgaacctaggaggcggaggttgccgtgagccaagatcgcaccattgcattccagcctgggcaacaagagcaaaactctgtctcaaaaaaaaaaaaaaagagtatgcaattcagctgtttttggtaaatttgtgaagctgcataactatcaccacaatccagttttagaatattaccaccaccccaaaagatatccatcttgtacctctttgcaggcagtccttgcttccacgcctaggcccaggctaccactaacctgctctttgtctctgtagatttgcgtttcctgaacatttcaaatacatgcagtcatacagtatgtagtcttttctgtaccaggcttccgtcacttagcataatgtttctgcgcttcctccaggtgatagctcatatcagtcgttcatttgttcttattgctgaataatattctattgtatgggtaaaccacattttgtttattcgttaaccatgaatggataatttcattaccattattcgttaatggatacttggattgtttccagtttgggctagtatgagtagtgctgttatagacatttatgttcaggtctttgtgtggacatgttttcatttctgctcaggagtggaattactgggtcatttggtaactctgtttaagtttttaagaaactgccagattgttttccaaagtggctgcgccattttcatagatagggtctcatgatgttgtccaggctggagtacaatggctattcacaggcgtgatcatggcgcactacagtatcaaactcctgggctcaagctgttttcccgcttcagcctcctgaatagttgggaccacaggtgcgtgccaccgcccctggctggggtccagtatttctttatcctcaccaacgcttattgttacagccatcctggtgggtgtgcagtggtatctcattgtagttgtgatttgcatgtctctgatgactaatgctgttgatcatctttttatgtgcttattggccattcgtgtatcttctttggtgaaatatgtatttgtattgtttgcctatttcttaatcttgttatttcattgagttgtaagagttcttgatatgttctggataacactcatcagatatgtagtttgcaaatattttttcccagaaaatatttttatttttttagtcatgcctttggaagtataaaagttttgtttttttttttttttgagactgagtctcactcttgtcacccaggttggagcagtggcacaatctcggctcactgcaatctctgcctcccgggttcaagcaattctcctgcctcagcctcctgagtagccgggattacatgcacacgccaccatgcccagctaatttttgtatttttagtagagatggggtttcgccatgttggccaggctggtcttgaactcctgacctcaagtgatccgcccaccttggcctcccaaagtgttgggattacaggtgtgagccaccacgcccaccctaatataaaagtttttaattttggaaattccgtttatcaattagtcttttatggattgtgcttttggtattatatttaagaactctttgacccagtatcatgaagttcttctttcatgttttctcctagaagttgcatacttttaactcttgcctttgaatctatcattaattttgatatcatttttgtgtattacataaggggcctaaatttatctttttgcgtattaatatccaattatcccagctccatttgttgaaaaaaagaccattttcctccactgaattaggtagcactatggtaaaagtcatttgattattaatataagggtttgtttcttctgatctattggtttaaatgtctatcctactgctagtgccacagtcttcattactgtagctttaaagttactttagaaatcgggaagtgttaagtcctcaccttgttttgttttccaaaattgttttggcttgtgtgggtcctttgcatactgacaagttttcagatcaccttgtcaatatctgcacaaaagcctgctgggatttgatagactgtgtgttgactctacatgtcaatatggtgagaattgccatattaatgtttagtcttccagtttgtgtacaaagaatgcttctctgtttatttagattgtctttaatttctttcagcttttcagtgcttgtagctttcagtgtacaagtctacacttatgttaaatttattcttatgtattttttttatgctattgtgaatggaatttttttttcttttttttcttttttcttttcttttgagacaggatctcactgttacccagtctggagtgcagtggcacaatcatggccttttgggctcaagcagccctcccatctcaacctcctgcatagctaggactataggcacatgtcaccatgcccagctaatttttaatttaatttaatttattttttgagacagagtcttctgttgcccaggctggtgtacagtggcataatcacagctcactgcagcctcgacttctgagctcaagtgatcctctcaccttagcttctggagtagctgtgactataggcatgcatcaccatgcctggctaattttttttttatttttgtggaggcagggttttgccgtgttgcccaggctggtcttgaactcccaggcccaaacagtcctcctgcctcagcctccaaaagtgctggaattacaggcatgagccaccatatctggcctaaaaagtatcttatttagtggagatatttggagataggatgccacactttgtatgatttcagtcctttaaagttttttttaccttttcttttgaaataatttcagtctcacaagaagttgcaaaaatactacaaataggctgggcatggtggctcatgcctgcaatcccagccctttgggaggccagggtagttggattgcttcagcccaggagtttgagaccagcccaggcaacatggcaaaaccctgctctataaaaaattagctgggcatggtggtgtgcacctgtaatttgagctaccagggaggctgaggtgggaggatcacctgagcccagagggatcaaggctgcagtgagccatgattgtgccaccacactccagcctgggcaaccgagtgagtccctgtctgaaaacaaaaaacaaaaactacaaatgtttatctacatgtgaaagaatgaagttggacccttacctcacaccatatacaaaaattaactcaaagtagatcatagacctaaatgtaagagttaaaattataaaattcttagaagaaaacataagattatatatttgtgaccttgagttaggcaatggtttcttaggtgagaacaaaagctcaaacaacagaagaaagaacaaaagcacaaacaacagaagaaaaaaatagacacattggacttcatgaaaatttaaaacttttgtgatgcaaaggatgccatcaagaacataaaaagacaaaccgtagaatgggagaagataattgcaaatcatgtctataaaggacttatgtgctgaatatacaaagaactctcacaacttgacaatataaaaacaacccaatatagaacatgggcaaaggatttgaatggctctttctccaaaacatccaaatggcctataagcacatgaaaatggctcaatataattatcattagggtaatgctaatcaaaaccacaagattctatttcacaccaactaggatggctagagccaaaatgatgggcaataacaagtgttggccaggatgtggagaaattggaaccctcatacatggctggtgggattgtaaaatggtgtagccattttggaaaacaatttggcagttactcaaaaaaatatatacatagagttaccatatgatccagcaattccactcctaggtatatactcaaatactaatatatgttcacataattacttgtgcatacatgttcagagtagcgttattcgtaaccccagaagtgaaaatgacccgatgtccatcaactgataattggctaaacagaatgcgatatagacccacaatggtatattactctgtcatagaaaggaatgaagtactgatacagactacaacatggatgaaccctgaaacacacatgaatgaaagaaaccagacccaaaagagcacatcttgcttcatcccatttatatgaaatgttcagagtaagcaaatctacagagacagaaaatagattagtgtttgctgagggctggggatgctgtgaacaggaaatggaaagtgattgctaggagtacagagtttattttggagatgataaaaattttctaagctcaggttgtggtgatggtgaattacacacttttaaagggtaaatttcattcattgacgtttgatgtgattgttggtgtgtttggattaacatctgtcatttttgctgttttctgtatgcctcacatcttttttcctccttttattctccctttattgccgtctttctgataagcagatattttctagtgtttcatttttattttgttgggttttaaaaaactttcttttttttttttttttaattgggtctctagggatcacagcatgcgtctaaatttatcacagcctacttcagattaatattaaaacttagttctagttaaatatagaaattttgctctaatatagtttcattttcttttccctcttttgtgttattattgtcacatgttacaagccccacagtatggttttataattattttatgaaatcttacatcttttaaatcagtcgagaagaaaagaaaaaatgtatttatgccatcttttatatttgcccatgtatttaccttttctcatgttttttctttcttattgtaaattggagttatatggcctcttttcctttcagcctaaaggatttatgtaatatttcttacagatcaaatcttctagcagtgaattctctcagtctttgtctgggaatgcctttattttgccttgattgattgattttggtgcagggtcttgctctgtagcacaggctggagtgcactgaactgcagcctcaacctactgtgttcaagcgatcctccacctcagccttctgagtagctgggactataggtgcgcgccaccacactcagctaattttttttttttttttttgagacagagtctggctctgttgcccaggctggagtgcagtggcatgatcttggctcactgcaagctccgcctgctgggttcacgccattctcctgcctcagcctcccgagtagctgggactacaggtgcccaccaccacgcctggctaattttttttttttatttttagtagagacggggtttcaccttgttagccaggatggtctcgatctcctgaccttgcaatccgcctgccttggcctcccaaagtgctgggattacaggcgtgagccactgcgcccagcctcacactcagctaatttttaaattttttgtagagatgaggttttgccatgttgctcaggccggtcttgaactcctggaccctagcaatcctcccaccttgacctcccaaagtactgggattacaggcatgagcaactgcacccagccaattttaaaaaaaaatatatttttttttgttttgagacagagtcttgctctgtcacccaggctggagtgcagtggtgtgaccttggctcactgcagcctccacctcctgggttgaagggatcctcccgcctcatcctcctgagtagctgggcttacaggcacccgccaccacacttggctaatttttgtatttttagtagagatggggtttcaccatcttggccagggtgatcttgaactcctggcctcaagtgatccacccgccttggctttccagagtgctggaattacaggtgtgagccaccgtgcccaacccttttttttttttttaatttaaaatttttctttagtgatggggatctcgctgtgttgcccaggctggtctcaaactcctggcctcaagttatcttcgtacctgggcttctcaaagtgctgggattacaggcatgagttactgtgcccttctccaccttgatttttgaaggatagttttgctggctatagaattcttatttgacagtttttttttcttcagcattttgaaaatgctatcctgatgtcttctggcctccattgtttgtggtgggaaatgagctgtcatttgtactgatgctccctgtgtgtagactttttcttttcctactttgaagcttttctccttgtctttgtctttcaacaatttgactatgtttaaaaacaaaacaacacgaaaaccaatttgactacgttgtgtccagtgtggctctctttctatttattgtatatggagtttcttggccttcttggatgtgtaaactaatgtgttccatcagatttgggatgttttgggctattacttgttcagatttttttttctggcactttctctctcctctcataggactcccattatgtctgtcttgatgcctttgatgatgtccctcatgtctctgaaggcctgtttattcgtattcaatctttcttacagattatttaaattctgtacagattatatactttttttgatctatctttaagcccactggttcttttcaaatctgccgttgagcccctctagtgaattttttatttcagttatcagaatttccattgctttttttctaatttctatttattatttctactttcctttaattctttaaatgttattttatttatctttgaacatacttataatagctgtttgaaatgtaacttgtaagccgtctagaaggcaatttctattaactgattcatttcctgagtatgggtcacattttactgtttgtgtgtctcacaatttttctttcattctttttttttttttttgagacagagtctaactctgttgcccaggctggagtgcagtggcacgattttggctcactgcaacctccgcctccggagttcaagcaattctcctgcctcagcctcccgagtagctgggattgcaggcctgcgccaccacgcctggctgatttttgtatttttactagagatggggtttccccatgttggccaggctggtctcaaactcctgacctcaggtgatctgcccgcctcggcctctgaaagtgctggggttacaggtgtgagccaccgtgcttggccatgagccactgcagccggcctttttttttttttttttttttttgagatagggttccactctgttgcccaggccagagtgcagtggcaggatcatggctcttctcagccttgacttcctgggctcaaatgattctcttgcctcagcctcctgagttgctgggactataggcatgcaacaccatgcccagctttgtgtgtttggcgagggtgtgcacacacatgcatacgtgtagggatggggtcttcctatcttgtccaggctggtctcagactcctgggctcaagcgatcctcctgccttggctttccagagtgttgggattacaagcgtgagccacctcacccagcctcagtttgttttgttgttgaacactgaacattttagatcatacactgtagcagctgtggattctgatttctaccttccaggccatggttgccgttgccatttttctccttttgttttgtttactgagtatcctgggctaattctttggagtttgtccccttgtggtatagactcttttctcttttaaaaaaattgttttaattttaagcataacttactaggggttgcctttggttcagcatggtttagtggtcagattaaaggttgtgctgaaacaccttgagccaataaagcttccatcctttgccaatggatctgtgtctgtgggttggggaatattttcaaagttcagtttcttccttttttttttccaagcagttcctgagtcggccccagccattactttctgcctggccatctggtgtctcccttgcacactctcaaggcctcatgttgggccagggatgtgtggacagcaagggccccctctagtctctctggagcttgtgtgcaaccttgtatatatgcacattgttccagaccagcagggctgcatgggaccttaccaaggccttgtgtggctatctcattccctggatcttcctgctaaatttctggctggtctacaggcctgctgctggctccagccagatcgtaaccacagtctagctgtgatgttggtcttccccatttgtttggcactaggccccagtccagccacaaagttttcatggcttgctctgccttggtcaaactgatggagctggtgcgtgtgatgggaggaaccccaaattaaacgccacatgttcccactgttcttacttgaagttcagcgtttatttattgagtttttgagtaactgcttcttgggtagttatatgcctttggttgatttctagaatcctcaaatggttgtgtttggcaattctgtctactttcattgttgattttggtgggaaatacttttctgagctcctctccacttccccattccagaagtctggttagcagctttgacttttgattttctctttaatttaagacatacccagaagtctttccaaatttccaaactttaaatatgtagctctagctacatatttcagtcaatttggaagctttttgagttgttgggtttggtttttgttttttaattttactttttagtatgaacaattgcaaacatataagaagtggagtttatattatccaggtgtgaccaagcttattttgtttatattctgactttgcccactcctcagcccattgttttgaggcaagtaccatatatcatatttcccttcacccataaatatttcagtaaatagttctaaagggagaagaggctgaatgcagtagttcatacctgtaatctcaacactttgggaggtggagacaggatggagtttgagactagcctgggtaacatggcaagaccccatctctacagaaaatttttttaaaaattaggcatggtggtgcatgcctgtggtctgaggctaaggcaggagggttgcttgagcccgggaggtcaagactgcagtgagccatgttcatgacactgtactccagcctgggtggtagagcaagatcctgtctcaaaaaaataagataaaaggagaaaatttctctttagaaacacaacggtgatataattatcacagctaaagcatttaatagtaatttctgtctttctttttgtttgtttgtttgtttgttttgagacagagtctcactctgtcatccaggctggagtgcaatggcccgatctcagctcactgcaacctctgcctcccaggttcaagtgattctcctgcctcagcctcccaagtagctaggattacaggcatgtgccaccaccacgcctggctaatttttgtatttttagtagagacagggtttcaccatgttggccaggctggtctcgaactcctgacctcaagtgatccacccgcctcagcctcccaaagtgctgggactacagttgtgagccaccgcgcccggccagcatttaatagtaatttcttaatatcataaaatagactcggggaaccttgaaaagtaagatgcccagtcaagtgaaatcagattctctgagagtgaggcctggacatcagcatatattagactccctcggtaattgtgacatgcagctgaggttgagaaccattgagttagatagaattctctatacccttttccagaattgttcatttctcatgtaaatgcattagcatgaaagtattctgatagaaaattatctgttttggggaattcaagaaaatttctttcctaatatgggatcaatttttatggccatcccatggatagtttataaagaattaatctcatctgttttctggcaaggggttctatatgaacttttaaaatcaaatttgctagtttgtattactcagattctctctagccataattttggtcaattttatctgttactctcctgaaaagaaatatgtttgcttcccacagggattatgattttatcagttctttttatatttctagtttttttttttttttttgagaaggcgtctccctctgttggcaggctggagtgcagtggcacaatcttggctcactgtgacctccgtctccctgcttcaagcgattctcctgcctcagcctcctgagtagctgggattacaggcgcgtgccaccatgcccggctaatttttgtatttttagtaaagatggggtttcaccatgttggccaggatggtctcaatctcctaacctcatgatctgcctgcgtcgttctcccaaagtgctgggattacaggcgtgagccactgctctgggcctggtttttgttttaaacttctagattcacattttctttgtaactttttgtcatgaaatgttgaggaaaagaacagcagactgtcttctacccacctccctgcccccacccctagtccctgcattctagattccttaattgtatctggaatttttctgatgtcggtatcatcaaatggtgttgggtgacattaaattccacgtcaaccctcctgaaacacgcccctgtctctccaggcttcatgtctgggacccagcgttctgtgtttgggcattgccacctcctgcccacctcagaagcacctgccaccttcctgatctttgtgtgcggtgggcacttgggggaaatgtgtatgttagaattggcagtctgtgatctatcacattattttgcacggccaaagtgtgtgccgggctcagttctccacccactctgctagtaccatttggttagacacagacagaatccccctgttcccctgccgtgtgatccaccgctgtttttttctgaaataagtgctaattggtttttaattccacttggattttaatgctgcccactgcagccttcatccagaaacactgatctgtttgaagaaatgttcctcaggaggaggaatcggcactgcagggagctggcaggttccgtccttcccagcttgccacagtggcctcgggcacctgccagccacacatgtccccttgcctcgggctcagtgagggatgctttgcagtgacttgctcatgatggcaaggacaggtttggacagagctccctttcctccatgtgtggagagctactgggcctcagttcatggaagctggaggaatgttatgagaccagcatggagcggtgggtctcagagtcctgatctgggatccaggagcattcctgtggcttctggatgactcctgccgtgcccacctccctctgcaccgtccatctggggcaggctctgttctgtagtctgttatgggagagactggatcctgtcctgccagccatctgggatggggaggtgattttgatccgcctccaccctcctccccagtgttttcttctgtttagaacactgttcagaactgtcccactccagggctgcctccaaaggcccacactcattcatgcccacttactctcagcctctgtccaggcactgggggaagggaaaggcagatgtcagtctggcaggtggaaaacaggagtgcgtggaggcgtgggggtggagcagctcccgcgagggcagaacaacagtggagtggttgggaacacagacttctggggcggacaggcccagtttccacgggtggctggggaattcggtgcaggtgacctcgcccctctggacctcagttttattagggctgccatcacaaagtaccacaccccggtagcctaaacaacagaaatttattatctcagagtttagggggccagaagtctgagatcaaggtctgggctcgggctgggttggttccttccgaggtctatcaagaagactttgtcctgtacccctccctcagctgctggtggtttgtgggcatttttggcattccgtggcctctgctgcagcaccctgatctctgccctcatcttcatgtggcattctccctgtgtgtgtccatgtggaagttcccccccaccctttttttttttttgagatggagtcttgctctgtcgcccaggctggagtgcagtggtgtgatctcggttcactgcaacctccgcctccctgggttcaagcagttcttctgcctcagcctcccgagtagctgggattacaggcgcccaccaccatgcctggttaatttttgtatttttagtagagacggagtttcaccatgttggccaggctgatcttgaactcctgacctcatgatccacctgccttgtgctcccaaagtgctgggattacaggcgtgagccaccgcacccggctggaaatttccccttcttataaggacactggtcatactggattaggggctcaccctacttgatcccaactttacttctgcaacaatcctatctccaaatgaggccacattctgaaacaccaaaggttaggacttcaacacgtgaattttagggggacacagttcaactcatgatggaaaaaaataggaatgataattacccatgtactagggttgttaaactttaaaaaaaaaagttatttatttatttagagactgggttatgtgactggctaatttttgtatttttggtagagatggggttttgccatgttgccaaggctagtctcaaactcccgagctcaagcgatccacccgcctcagcctcacaaagtgttgggattacgggagtgagccctggcgcccagccacttacgttattgattcatacaagtaaagcctttagctcagttcctgtcacatagtaagtgctcagtaaatgttagtttcattaatgggttctgatggcctcatctctttctttctttctttctttctttttttgagacagtgtctagctttgtctctaggctagagtgcagtggcgcgatctcagctcatgcaacctctgcctcccgggttcaagcgattctcctgcctcagcctcccgagtagcggggattacaggcacgcgctgccatgcccagcggatttttgtatttttgttagagacggggtttcaccatattggccaggagggtctcgatttcctgacctcaggtgatctgcccacctcggcctccaaagtgctgggattacaggcatgagccaccgcgcccggccggcctcatctcttaatgggacaattgcagtcctaattagctcactgcttctattcttgcctcctctattccatttctggttttcattccaaagccagaaatgaaatcatgtgatataccccatgtataaagccttcagtggtttcccatttctagcattcagggtctttgagtctcaggtaaaagaaaaccaaacccaaactgtccgaaggaaatggagataacatgatggaagtccagggataacctgctttaggtgcagcttgagccagagctcaaataatgttattactaatgctgggtttttctccttgatctcccaagttggttccagtctcaaattggttgtcctctgatagttatgattgcagcaactctggcctgacatcaggtctggtggaaaaagagagagtgagttctttttttcttgtggaactttctgcagaaattctgaagctcactgtgagttggcttgggtcatgtgtccagctgttaaccattgctatgaccagggaggggaaggtggtcgattggcttagttagacctgggtcaggtgtggaaccccattgacacatcatgtcctgaaagtggggatcatctggattgcaaatgaaaatagtgttctttttaggaacagagacaatggctgctagggggaaacaaatcagttactctctaatatgctccagtgcttaaaataactttcaaaaatcctgaccaggaatggtggcatatgcctgtagtttcagctactagggaggctgtggtgagaggatcacttgagctagctgttcaaggctgcggtgagccatgatcatgccactgcactccagcctgggcaataaagagagaccccatctctgttaaaaagaaaaaaagaaaagaaaaaaaccttataggccaggtgtggtggctcacgtctgtaatcccagcactttgggaggccaaggcgggcggatcacctgaggtcagggatttgagaccagcctgaccaacttggtgaaaccctgtttctactaaaaatacagaaattagctgggcatggtggcgggtgcctgtaatcccagctacttgggaggctgaggcatgagaattgcttcaacccgggaggtggaggttgcagtgagctgagattgtgccactgcactccagcctgggtgacagagttatactgtgtctaaaaaaaaaaataacacaaataaataaaaaacaaaaacaaaaatccttatcatggcttataaggtcccccgtgatgcagccgtgctggccttgcttactgcacaccagccagtctttcatattcatttctcaaatatgccacactttcctccggcctttgtgtgtgcccttccctatgcctgaaatgcttttcctgactgcttgtcttctagccttctcgttcttatccctcagatcttagcctaaatgtcaagtcctcaaagaggcccttctggactgtcctgaatgtaaactaggccgcttgttattcctgcttggcaaagcttcatagcagttatcataatatttaattacacgttatgtttgtctttacatgtttaatgcccgtcttcctcactgggctggctgtgagtcccaggaggtcaagcccagacctgttatttatttatttatttttgctttgcattgcatccccagtacatactaggtgtgcaaaacaaaacaaaaaacctttattaaatgaatgtggttgaaatagaattgttactcatttaaaattttggttagtttgtcattggactagagcagggaacaaagtctggccggaagtttttaaaaccctggcggtgaaatttcaaagtgaaaatgttactcgtaagttaaatgaattcatactgcagccatattttttcaggctggctggtattagtgatgcccaaagtgactttccttttggagtcttggggccagtggagatggtatatctcccaacaataaaaatttcaccacgttaagtggagtactacgattaacacacatttttaattagcctcttagtcatctcctatctgaagaggccaggacaggcattttaatacttggttattggactacctctaaggagctctcccatgctgcagataccgttctgaatctctgcagtttgtcaaggttcctgcagccggaagctgttttccaggccgctctcttctcactaaagccacagttctttcttcgcactaaagccatccgttcagcttctgtgcagagggaagaggtccctgaactggcatgactgcaaaggcggttgaaccctcctctcctgcaggatgtggagggcatggaggctgtgccgtggatgggtggtgcatctcagaagagttagcttcagcagtcattgggtaaagcaaacatgctagagagtcacaactaccttcacgttctaaagatgtcgggtattagtgaggtagaggtttggctgctgtaacagacccaggatagtagtggcttaaatgcgagggcagtttatttccctcctgtgaaacagtttgagagtgagcagcccaggcccctgccgtcttgttgctccctgttcctggggtgttgctttcatctgcatggtccagaatgattctccattattgccatgtgtgcagcctggcctgtggtggggaggatgtaagaggagaggttatacctcctctttttcaggcagttgtgtttttttttgagatataatttatgtgtgttaaaatttgcccttttttaaaaatttattcctcccccacctcccatgcttttttttgtttgtttgtttgtttgtttgttttttggagaatggggtctcactctgttgcccaggcaggtctcaaactcctgggttcaagtgatcctcctgtctctgcctccctaagtgctgggagtgcaggtgtgagccactgcacctggcatatttgcccttttaaaacatttgatggttttcagtgtattttccaggctctttaatcatcataacaatctatttgcagaacatgatcaccacctcaaaaagaaaccctgaacccattcccgcttccctgattctgccctgtgattttcccatcccttcagcccctggcaccactaatctttctgtctctatgtatttgcctgttctggacatttcatgtaattggaataatgcagtatccatttctgtctggcttctttcactgagtgtcatgttttttgttttttggggttttttttttgcagagacagagtcttgctctgttgcccaggctggagtacagtggcgcgatctcggctcactgctacttcgcttcccaggttcaagcagttctcctgccttagcctcctgagtacctgggattacaggcgtgtgacaccatgcccagctaattccttttgtattttattagagacggggtttcattgtgttgcccaggttggtctcgaactcctgagctcaggcaatccgcccgcctcagcctcccaaagtgctgggattacaggtgtgagccatcacgcccggcctgagtgtcatgtttttaaggttcacccatgttgtgcatgaatcagtacttcattcctttttgggttggataatattctgttgtacagatagaccacattttgcttatccaggcatcacctgatggacctttgggttgtttccacgttttagctattatgaataatgctataaacattcatatataagtttttgtgtaaagatatttttcagttctcttggatatctacatacttaagagtggagttactaagtcatgtggtaactatgtttagcttttttaggaataaggcagagatacctagtgtgtgtgtgtgtgtgtgtgtgtgtgtgtgtgtgtgtcatgggccctttgacatctttttctctcagttgtgtttttaagtttataaaatgtaggatgacaaaggaaactaattgtcttaaaatgtagtttttgaaatacgaagataaatttgtgatatagtgtggcaaaatccattggcagatctaactaccataattccaaagtaacaaagggcataagtgctattttgagacgtttgtaagaactgtgggctgggtgtggtggctcatgcctgtaatccctgtgctttgagaggctaaggtgggaggatcacttgaggccaggaatttgagaccagcttgggcagcatactgaagccccatctctacaaaaaatttaaaaacttagccgggcatggtggtgtgcacctgtagtcccagctacttgggagactgaggtgagaggatcccttgagcccaggattttgaggctgcagtgagctgtgattgtgccactgcattccagcctgagcaacatggggagaccctgcctcaacaaaataaaccaacaaaactgcaatgtgataatatacctgtggtttctgttggtgacaaatttgtaagcatgaaaactatagtttgcctatattcctaattgaagaaaatgctgaatttctgttagagattagtgaaaataaagaggtaattctgcccccttccccccaaattagtggagctcctgaattctatcctgcttcaaagagcatgacccagaagttgcacacatttccttcactccttccctgtgatcctgattagttacatggcgacagctagctgcaagggaggctgggaaatgtagtcctcattcaagtcaatcaggtgcctggctaaaatataggggttccgttattaaaggaaaggggggaggataggtattgggggacaagaagtcaatactgtactgcagtacacactgtgcagccactttctcacccaggtcagaacacgtgttcttctcataagcacctgccagaggagttagtttggctttggggaccatggtgtatgaaaaaaaagcgcatctttttttttttttttttttgagatagagtattgctctgtcacccaggctggagtgcagtggcgcaatcttggctcactgcaacctccgcttcctgggttcaggtgattctcctgcctcagtctcccaagtagcttgggttacaggcatctgccaccatgcccagctgattttttatattagtagagacggggtttcaccatattggccaggctggtctcgaactcccgacctcaggtgatccacccacctcggtctcccaaagtgctgggattacaggtgtgagccactgtgcctggccaaaaaaaaaaaaaaaaaaaagcgggaggggggcgcatcttgaagcactaaaacgcctctcagcactctgagagtgctgctcgcatgacgaagaactgaggctgcctgagggagtagcgtatgcctgtcccccatcccacactcacaccagagcaaatgcttaggaagtggaatgctgggtatctgttctgcttaaattatttgtcctttagtgaggggtaaggggatcctagttgaagttatgagaggtaaacatttgatacaacctctctgtgcctttttactgtgcagtaagatgtgtggtttggcttctcagatgactggatggtgatgctatattggaactcttgattctatgtgtcagactccaccctcgatcacccaaggcagaagagggattgatgtgttggcctggagtcccaggaagatcagcaacagagagtgggcagctcaggcctccggcagcaaattaacaggacatgggcagcccagaggcaaagtgacttccccattgtcctggttgtaaaggctgaagggtcatgatgctgatctaacattggtaacagctggactttattgagcacttcctgggtgcctggcagtatttgttttcatcaaccttatgagatgggtcctgccataccccactttcctgatgtgtagggactcatcgacctcctcaagatcatatagttacttatttgtggctgggcatgatggcttgcacctgtaatcccaacactttgggaggccgaggcaggaggattgcttgagccaggagttcaaggtcagcctaggcaacatggtgagatcccatctctacaaaaaaattagccaggtacagtggtacgtgcctatagtcccagctactcaggaggctgaggtgggaggatcacttgagcctgggaggttgaggctgcaacagcaagtcatgattgtgccactacactccagcctgaacaagagtgagaccgtgtctcaaaaaaaaaaaaaaaagtattgattcatggcagaggtggggtttgaacagagagtctggttctagccggtactgtcatgagggcagagggtgagatgcaggagcagaaggcttgacagcctggacagaggagtttgtgttttccttcatgctttcatttcgtgaatctttgttactgatgatgacttttgagttgacgtgattgtgccatcccagcctcccctccctctgttctaacacccagtggtacatccccttccccaacagcaccatcagacacacaggtggctcttgtggaatctctccattccccattattctaggccagcccttctcccttatcctagttttaaacatgaatttataaagggtagttaatttgtggccaggtgtggtggctcacgcctttaatcccagcactttgggaggctgaggcgggcagatcacgaggtcaggagatcaagaccatcctggctaacatggtgaaaccccacctctacaaaaaatgcaaaaaaaagtagttaatttgttactcagcaaatctctacggtgcctaccagactccagatctgggctgctggacacaggaacatcgttaagcaaatcccggccgtcgtggaactgacagcctggaggggacgcaagagacttgggcattcaacagataacttcagagtcccaactgcagctgtgatacataccaaacaggaaacagagagagagcgaggagagcatattaatgtgcggaacccagggcctgacccggggaccaggaaggaggatggcaaggagggcttcccgaggaggcaccgtgtaggccgagcctagagctgaatggtggcagagagggaacagagcacttccagggggaactggaaagccctagacacatcaccccagtcctcactcccactgaactctgaggagacggctgcaagtcgaggctccccacccaccagcacgtcacagtgtgtccaggctcagggtccccatctgtaagatgggagtgatattggtcatggtgcccatttcattggtggatgtcactggtggattaaatgagttactatatgtaaaactttagaacagctcctggcctgtggcaagggctctataggtttaattagtcattaaaattaaaatttgtatgttgtaggtctaaagatggctaataaaaaatcaccccacccaggccagaatccaagttagaggactgcttgacagggactgccagacacagacttggttgtgggagtcaggggtgcagcctctggctaccacccccaggaggcattcagaaatggggggttggccgggcgcagtggctcacgcctgtaatcccagcactttgggtggccgaggcgggtagatcacttgaggtcaggagttcaagaccagcctggccaacatggtgaaaccccatctctactaaaaatagaaaaattagtcatgcgtggtggcgggcgccagtaatctcagctacttgggaggctgaggcacgagaatcactcgaacccaggaggtggaaattgcagtgagctgagattgcaccagtgcactcctgcctgggtgacagagcaaggctctgtcttaaaaaaaaaaaaaagaaagaaaagaaatggggagttggtctcacaatgagtggtgggggccagggatgctgactgacctatgcacaggagtgttccaccaaacatgcccacggcgccccaggggagggttgtcctggaggggatttccttgggtcttcgtcttgttgtacgtctcttattgggtttctctccctggggtggaaagatggctgctcttggagatgcaggctgcccctgaatgccctgatcactgactccaacttgtaaaatatttgtaagatgcccccgcactgcagcactgggaagcagtgccggccagtctggcagaaagtgtgaaacccagtaagtgatctgctttatcaatccaggttcttgggttgcaagcaacagaaatcaactcaggcaccctgaggccctaaaagggtcgagcagctctggggtgtctctcagtggatattcttgggcacttttttagggccctgcattgaagagcttagacactgcagcccgcctcctgggtgagaatcccaacctcactccttattcataagcatctcaagctttctgtgcatcagtttgtcggctataagatgggaatgagaaccggagggttgctttgaggattcagtaagttgatatttgagacgtgtttagaacagtgtgtagtgtagagtatgtggctagatatatactagctgctattatttttattaagtgctgtggttattactattagtattatttttttgagatggggtctcactctgtcacctaggctagagttcagtggcacaaacacagctcactgcagcctcaacctcttgggttcaggtgatcctcccatctcagccgcctgagtagctgggactataggcatgtgccaccatccccggctaattttttgtatgtttttatagagacagggtcttgccatgttacccaggctggtcttgaactcctgggctcaagcagtccacccacctgagccttccaaaatgctgggagtacaggcatgagccacctcacccacctagcctaccattattatttttattttattaaaaaaaattttttttatgagatggaggcttgctctgtcgcccaggctggagtgcagtggtgtggtcttggcacactgcaacctccacctcctgggttcaggcgattcttctgcctcagcctcccaagtagctgggactacaggcacgcaccaccatgcccggctaatttttgtggttttagcagagacagggttttgccatgttagccaggctggtcttgaactcctgacctcaggtgatcctgaggtcctgccttggcctcccaaagtgctgggattacaggcatgggccacttcacccggcctcattattatttttattggcagcttgaaattgaaatccctgagcaagaggaagccattggcccagtttggatcaggtgggtgggcaggtcccatgattggcagtcccctccacgcccccccccacagaagtaggaggaacgagggagaaacagttgtccccaggaaaagtgggctgctgtcaccagaagttggggcagagactccaggctccaggcaggtccagagcgcccgtgtcctccatgctcagtaactggactcaacaaatgttggttacttccctgctttgtgccatggcctctgctgagcacagaagacacagaagggacagtgatttgcacggtctcctcctcacaggtcctgtagtccagaaattgagggtcctggttaaaactaaatgcctagaacagtgcctggcctttaggaggtccttcgtaaatgtttcctcaatgaataaacacacagggaagtgcaagagttttatggaacacacaacaaaagcatcccactagttattttaaagaaatccatgtttgtacctttagtctccaggatgaggttcagaggggtgtccatgcacacagtaggtgtttaataaatggggactaaattatctaataggtgcatggtcctgcagcctgtccggtgtgacagttgagggcagacccagagttggggagctggctgccttctctgttgaacaggatgtgcagacgtggctccaggatgcatctctgtggaatgcagtcgctaatacaaatgagcttcctcacgtcacaaggcatctattatgtggacagttgggcgatgggccgtgggactgggcgggctctctaggggagtttcagagccacagttatgtttagggccttcctttggagagggacttttccccatgaatgactcttaataacaaagataataatagccaccactttccaggtgcctgagctgtgcaaagggattaacccatggactcctcacaatggcccatgaagccagtatatgatccccattgtgctgaggctcagagagggaaaataacttgcctgttgtgtgcacagcaagtgagaaattgaggtgggattctggccatggtctcttgctccaaagcttgggtttgtccttctataccatgcacagcctgttttctctctctagtactaagtttaaaacaatattatttttattaatttgcatatagtacaatatttaaaaataaaaaggccaggcacggtggctcacacctataatcccaacactttgggaggctgaggcgggaggatcactggagtccaggagttccagactagcctggacaacatagtgagaccctgtctctacaaaaaatttaaaaattagctgggtacggtggctcagggctacagtcccagtcactcgggaggctgaggtgggaggatctgcttgagtccaggaggttgaggctgcagtgagctgtgatcgcaccactgcactccagcctgggtgacagagaccccgtctcaaaaacaaaaccagaaaaaaaggcagtttcccttccacacccaaacccttcacagaagcagccactgtgacctgtttctcacatctcctttcagaagtcatgagtacaagcaaatctataaacatggcagctgggctcaacattaagggtggccacctgtagcctgcgggcgagatccaactcactgcctgtttttgtatggccagggagctaaaaatgggttttacgtttttaaaaggttaaaaaaaagttaacactatttcatgccacgtaaacctatatgaaatttaggtttcgccaggcacagtggctcacgcctgtaatcccagcactttgggaggccgaggcaggtggatttcctgaggtcaggagtttgagaccagcctggccaacatggtgaaaccctatctctactaaaaaaaaaaaaatacaaaaattagctgggcgtgatggcacacacctgtaatcccagctactcaggaggctgaggcaggagaattgcttgagcccgggaggcggaggttgcagtgagccgagatcgtgccactgcactccagcctgggcaacagagcgagactctgtctcaaaaaaaaaaaaaaaaatttaggtttcactgtctataaatatttattggaacacggcccgcccatttggttgtgtattgtctgtggctgttcttacactgtaatggcagaattgagtggttgcaacagagacaagtgtgacccaccccccaaacctacaatatttgctctttggccctttacagaagaagtttgctgatccctgcactacacactttcctttagtaatgcgtgttagagacagttggctctcagcacttttcttgcgtgctaactgtgctccccaaaagcagagcccagctgcaagccgtgggcatgcccaggttcggctggcggtgggtctgttggtgcctccgcgtgcacactcactctgagcatttcttgggccctggctgcgtggcaggccgctggctgggagccagggcaggtctaggcctgccctcaggaatccacaggccggtgggtggggagagtcagacagtatcgggcagtcctgtggagggatgtattcaggcctgctctcacaggccttccttgaccctctccccatcactcccactttgtttttatttgtggcacttaaataaaaaataggtcatgcatttatatgcttcaaaatcaattctatgtggatgtgtgagcagtctctgtcctccactcctctccctgcccaccttgttccttctccccttacgtaatgatttgtattttcccttgggtatccgtctaaggtatcattatatcaatacaagcaaatatgaatatatatttttgtcttctccttccttcgacaaaaggtagcctactcagtactctgctctgcactttgcaaatgtttactgaacagtatgccctggagatcctcttattttagtgttctggtggaaactgaagggtgggtaggagttaataaggcaaaaaagaaaggtgtatcttagggtgggggaagcatgaggaagagcattctaggcagagggaacagtgtgaacagcatgcttccaggttccggggagcgtggctccctccagagcagggggaaggcctgggaggctgaggccagggaggagggggcccgtcgaggcatgaaggttcagcaaggcctgatggtcaatggaggaaccgtgcctttaattctgagctcacccgggtgtggggttctgctctgtttccttccatgccctgatttctctgtggccaagtacacttggccgtcattccatatgaccaaggagaggccaagaatgtcctcgagagagggttattggggctggttaatgatggaagaatttctcctgtgagctgcgctcaagaagtgtgacctggtgtctgggaggtttcaggcctgttcctcctgcctcctcagttctttctagtcatgagacacgggacacatcccatcagttctcatcttttcagtagacacagtcgtagtgccaaatacaggctttgtttggagggtaatgcatacaccgtgctcagttccaagttggccacatagtgagtgctcaagatgtgatagagatggctttggttctttttatagggctggtttgggctcatactttgttagtatagctcatgattaaaggtttggggattctgtgaagtgccttatgcctgtaatcccagcattttgggaggctgaagcggaaggattgcttgagaccaggagttcaagaccagcctggagaatacagcaagactcccacctctacaaaaaatgagccaggtggtggcacgtgactgtagtctcagctactcaggaggctgaagtgggaggatcacttgaacccaggaggtcaaggctgcagtgacctatgcttgtgccactgtactccagtctggcgacagagggagaccctgtctcaaaaaaaaaaaaaaaaaagagttttggtttgatcacctgagttctaatacctgctctgccacttcttgtccgtgttgagcaggttacttaacctctctgtacttgatttttgtcacttgcaaatgaaagtgataatacttgcctcttggtcccatagatgccggcaattattattattcctattatttcacagcctctgctgtacagtattgtcagatgacgcagtgccagtggtagcagcgtcgccatcatttcagcagcagtgcccttcgttagctgtaccacctcaccttttctgcaggacaccttcccgcaaatcctttcctgtcaaagggttagggtagagttgctccgtgagtatttaggaaaggaggccctggaagagaggattgtctctttagtccctttatgagtcattggccatagaaagttacatgaccacccataactgcagggaagggtgagagatggagaattttcctaatcgcctcccacacagaatataaatatcaccaccacagctgtgtgcagtacgtatttgtgagcacgttaatctatcttgccatcagagaggctggctccagcatcttacgcatgtccacgttgtggtcagtttgcaagaagtcacccgtgatatgtggcaaaacagccggactcccaacataaagtgctggaaggaagactgtgagggacacagttgtaaaggttctcgaattgtatctgtctgatcagagaaacaatttaatgtcccagatcaaagtcgagaggcaggctctgggaactgggctgtgagcagccagagaaaggcggcagaaccagtttcttcagggcaggtctcttttatctgcttgtctgattgcctggtggacactccattggctcccagaggccttcctggtcatctcctccctctggctgggtccttgatctttgcagatggctgcgtcccctggggccagggagcacctactgtgtgcctagtgctggccaaggtactggagataatcataggtaatgttcttccagcgttcaccatgtgcttggtgttgcggttacttgagtgaactcatgtaatcctcgcagtagccctatgaggtgggacagtgttaggtccattacagacatggagacaagcccagggctgctatgtcacttccccaaggtcacaaagctagttaggggcagcctctaccgtctggatcaaagcccgccatgtaaatggctccagcttttgcaggccacatgcacgtcttcagagctttctccataatggactcttttggaagaccctggcctccaagggctgtatagtggcttatggctctcccagttaatggtgcttatgaatgtggctgtggagggagagaggctggggctggacaacctgggctttcccggtgtgacctgtggcagccagaaagagggacggggtcaagcaggggcatctttgtccacccttagctcctcctggctattcaggacccaccttacaggttcctgtggcctccctgggttgtcttcctggggtcgagggttctctggcaggcataccatggtgcccttgcccctctaccccgacatcccagccaggccatgttgaaattgccttttcatttgttagttgatctatgcaaaatgttgggagggcaggggccttgcatctacttcccttggcccaatcctggctgtgcagtaggttttaaaaacacgtctgaacaaatgaataaataaatgactcatgtgatggaactaacatctaaacagaacttaacttgcagtatcttctgggcaaatgccacatctgggctagagaggcagtggagggtggtggttgaaagccgaccctggagccacgtgctgggagttgaaatccagttctgtcgcttacttgctgggtgacctcggacaagggactgcacctctcaggacctcagttttctcatctgttaagtgggataatagtaggacctgccccacggagcagttgtgaaggttacgtgagttgaaatgttaaagcatctggcacaggcactggcttaagagttagcagctgctcctaggcaccgtgcagtagcgttgaccatgaagagtaaccgagtcttagcctcaggtatgcggagagaccagctcagttccaggggagatgttgttcaccttgtgaacctaagaaacagtggtttcatccaaaaaagattgctcagacctggcatggtggctcacacctgtaatcccagcactcttgggaggctgaagtgggtggattgcctgagcttaggagttcgagaccatcctgggcaacatggtgaaaccccgtctgtacaaaaaacacaaaaattagctgggcgtggtggcatgcatctgaggtctcagctactcaggaggctgaggtgggaggataacttgagcctgggaagcagaggttgcagtgagccaagatcataccactgccctccagcctgggtgactgagcgagaccccatctcaaaaaaaaaaaaaaaaaaaaagattgctcagcactgatgaggaattgtaactgtaaccctgatcagtaagcttgcttcatacaggcatgattcgagtggagatttttggagttgcacgaaactatgtgttctttgtgggagaagttgggagaaagacccagcccggctgaatctcctgagaacaatgaggcactttttgcagatgcgctgtccttccagtctcagggagcgctgtgtgagccctgcgcagggcggggcagcgaggcggttaagggctggattccatccttactaatgtgtgaccttgggcaagtaacaccaagcacagtcaaagagaaaattagtaaatgaaattcactctgagtatagaatagagataaaatacatagaagtaacaaaacgggtggagtgagaagaagcatacatctagtaggatttccagaaataaagctagaaggagtggtggggaggcaatattagaactaatgctaaaaatgtgccataattgaagacttgcatctcaatgctgaaagctcacaacgagtgccaagcagagactggataaaaagaaatcccccagatagattattgtgaggctgcgaaacattaaggaaagagagaaaaccttggaaactagcagactaggctagggcaagtaacaaaccatctctaagcctcggtattcatttctgcaaagtgaggaaaagaactagttactatgtgaccagcttactaatgagcttggaactagtaaagatctttttgcataggtcctgacacatagcaagtgtgcattaaatgttagctgcgttactgttggtgtcataaacgttaatgacaacagtagtgattgttctgtaggctgctgtggaatatggctggtactccacagatgcctctcatgcaggcaactctgtagcaaactagagcatgtccttgtggtgatccctgaagaagagaatagtcatttcatgaacgtgactggaagtcaagatttgtggattccttcaacaaatatttctggggcctcttgtctgtgctaaacactgtttcaaggcccaggtatgcagcagagaagacagacctagtccttgctgtcctggagtacaaggtctggtggaggagacagactagaaataaacagtatttatcagaagtgattggtagtgctattaagacgttcaattattgtagcattttgggaggccaaggcaggaggatcagttgaggccagtttgagaccagcctgggcgacagagcaagattctatctcttaaaaaaattgtttttttctttttttttttttttgagtgtgggtctctctctggttgcccaggctggagtgcagtggtgcaatcttggctcactgcagcctcaacctctctagctcaagcaatcctcccacctcagcctcctgattgagactagagtcatgtgccaccatgcccagccaattttacgaagaaaattgttttagtcaagtgtgatggcacatgcctctagttccagctaccggggaggctgagacaggaggatcacttgaagccaggagttcaaaaccagcctagacaatagagagagagaaagaaaagaaaggaaaggaaggaaagaaactaaaccaggataaagtgaagtgagtggtagtggtgggaggggtgtcttagagggatgaggaaggggtctgtccgaggaggtgacatttaatctgagacttgaaagatgaaaaggagccagtcatgcacacaggtgggtgaacaagggtgagaatgtgttgggagggatttgtagtttgttccccaaagcctccatttgcttccatcctaggggtgtttggagaggatggctgtggggagctgactttggcgtctaggaagagaggtggtgggcccagaggccgggcccctccctggctcctcccagccttcccagggcccttacccagggatgcggggccacagggaagagacccttcgccccttgggtggactccctgacttcccagccaagaatgtggttgtcctttttgttccaaaggtgacccagctgcgccgtcatgcgagcaaagcggtggcgctttgtgcctgaagcccactttctccttccccagatagatcagctcaaagctgtctgccctagagaagctccagaaagcagccaagccagactgggcatgctgcttggggctgtgggggaattaaccatctcttttctttgtgtcaaaggtggggaaggtattaaagcaacagggcttcctggatagagccacagttaggagcccagattcagggcttaaactccggcttccccacttacaccttgggcaaatgccttccatgtgcctcaccttagctttcccatctgtagaatgggacagtaattcctgtgcttagaaaagtgcacacaggatgtgctacataagtgttatcaccttccaattttaactcgaggtgagatggctttctctttcctctagtttcttgtcaacagttaagacacttgcattcgacttctgtttctccacaccagcccggttcttgcccaggagcttggcgtctggcagtcagccaggcttcaggtgccaaaagcagcccctttgctggggaaaagcaggttatttgatgccaggaagctgagaattgtcaggatgtttgtcgccagcgttgggggcctgtgtggtgcctccacaaaagggactgctcttgcttgccagggagagaagactgcttcctccagggcagcttcttcttttcttaaccctggctgcacgaaccctattagaatcaggtgggcactgtttacaacgtgcccgtgcctgccttcccctttcccctcttcctgtgtaaagggcctgaggcctaggtgtggagacttttttttcttagctgcctgatgtgccttcagggacactctctgaattcaggggcattcacaatcactgaatgtagctgagaaccacctgggggtcgtgataaaatgcaggttctcattcatctggtctgaggaggagctgagcgttttcttttttctttttttgctttttgagatagagtctcactgtgtcacccaggctggagtgcagtggtgcgatctcggctcactgcaacctttgcctcccaggttcaagcaattcttgtgcctcaacctcccgagtagctgggattacagacttgtgccaccatgcctggctaattttcgaattttttgtagagatggggtttcaccatgttggccaggctggtctcaaactcccgacctcaggtgatccacccgcctcagcctcccaaagcactgggattatagatgtgagccaccgcgcccggacacatctgctttttcagtgagctcccaggtgatgtagatgatgctgtttcccggaccttaggtgtcagaatcaagggcctagaagtctgcttttcagatgtgtagaatctgggacacgcactttgaatccttagctgcatttttcccagaccccttggtgattgactacccattaggatttgggagcctagaccagggtttgtgaaccctgacgctgttgacctttggggctagatcactctttgatgtcagaattgtcctgtgcatattatgggctgttcagcagcatccctggcctctacccactagatgccagtaacagcaccccccagcggggatcatcaaaagtgtctccaaatgtcccctggaatagaggtggggcagtgttgtccctagttggttaccagcggcctcgcaccctctaatttcaccatgcctgggaccccctaggccagctggtcactcacatcgatgctcaggtcccacagtagcagtcatggccactttagtttggggcaggccccagtggggatacaagctcttggtgcatctcccgtctgctgcactttgacagccactgtcccggcgcctttactgctcagtaaatggtgggtgtggctggactagcaagtggggaaaggataataaacggagcttggtatttgtgttgggagagtgggaatcagaatgaagtcaccataaagtcccttttaataacagtagagaagattctaggcttggtggtattatctcctttggaaattgtcccaaattctctctctattctcccctcctcctacagtccccctgctggtcctgtctgtccttggctcccactggcctaaggcagcagtctctcattatcctgctggctcctgccctacctctcctggtctgtcctctgcactcagccaggtggggcctgtgaacacctgaggtcacggccctcccctgctcagaacctcccatgggatctggagtaccagcatctcactcaagagaaaagtcaaggccaggtgcagtggctcacgcctgtaatcccaacactttgggaggcttaggtgggaggattgctggaacccaggagttcgagaccagcctgggcaacatagaccctgtctctacaaaaaattttataatttttaaaaaattattatcaaaaagagaagcagggtgcagtggctcatgcctgtaatcccagcactttgggaggccgaggcgggtggatcacctgaggtcaggagtttgagaccagcctggccaacatggtgaaaccctgtctctagtaaaaatacagaaatgagccagacatggtggtgggcacctgtaatcctagctactcgggaggctgaggcaggagaatcgcttgaacccaggagacagaggttgtagtgagccgagatcacaccactgcactccagcctgggcgacagagcgggactccatctcaaaaataaataaataagtaatacataaataagaattaaaaagaggaaagtcagtgtcttttgtgtggcccactgggcccccttgatctggccctgtcacctctctgccttgtcctctgcttcctgccccattgctctttgaccctttccctgctcctagaacgcaccaggcacgttcgctctccaggatctctgcgcgggccgtcctccctcccactccacacagtcctctggctgctcctgcgaagcttcccttaggtttctctgctcagaagtcaccctcccagcgaggccttctttacaagcctgacctccaaacaaaaacagattcctctccccttctcatgcaatataagccctgttagagctggggccttgtctgctttcctgtggtttccccagcacggtgcctgccgtgtaggaggtgttggctgtgtgattgaggagggaatgagtgaactgctgcttaagtgcttctttgtgcctggccttgtgcatcctcccacggaaccttcctaactctgtggggcagctcctgttttttgtttgtttgtttgcttttaaagacaagatattgctctgtcacccaggctggagtgcagtagcacagtcatagctcactgcaacatccatttgctgaactcaaaccatcctcccacctcagcctcctgagtagctgagactacaggtgtgcgccatcactcctggctaatttttaaaaaatatttagtagagacggggatctcactgtgttgcccaggctggtcttgaactcctggcctcaagcagtcctcatgtcttggactcccaaagccctgggattacaggcataatctcagtgtaccactgcacccagctatgcagcacctatcttgagctccattttacaaatgaagacatggaggttctgattaagtcactgcccaaggtctccctctgaatagggaaatcctcagaacacacatcaggcctccctgcttaggatgaattcttttttttttttttttttgagatggagtctcgctctgtcacccaggctggagtgcaatggcgtgatctcagctcactgcaacctccgcctcctgggttcaagcgattctcctgcctcagcctccccagtaagtagctgggattgcagacgtgagccaccgtgcctggctaggatgaattctttaactccctacatcattgcactgcttgttgggtggcacagccagaatgagccttggcttcccgtgcactcagtcggggtgctggggcctggctgagccgggccattggagagtagaggatttggggttccctgctgtgcttgttgacgtagacccccccacctgaccttttgtttggccctcatgcatatttagggtttcacctggtggagtgggggaggggaggctccttctctggcgtttcctctgtgaaattctggagtggggtcagctcctgtttctgccctacggccgcatgcctcttctggttgctcaaccaccctggaagaattcccaggtcattttatacccacatcttgatttttgtaactgggtggaccagatcaccagctacctgggggtagggacagaggcatctttttgggtctcttttaggcctggcaaggtggtgggtgttcttgttaaaagatctaaaaacctccattcattcctatgtatctttttggggcctcttgcatgttgggcactaccttgagcctatgggaggaaagcagccagtgagacaggcggggtcgtggggtgaatacctgtggaactttggcggaagccaggtccgatgggatctggagtaccagctttgacttcagagcgctctcttctggctgggcatggagacaaggaatagatacagcaatagccacataactgcaggtggacgatgagtacagctcttgctcagctagtcagcccacagcgagaaccccgccccagtctgggctaacgtgtcctctgctgccagcagcccagtagggttctttgctggagtctggtttttccttgacttgtagctggcaagtgcttacacgctctcagaggcccagcagacatctctgtccactcaaggggcatgtgtgtgtttaattggaccactggtaccaacaacagcagacacgctcagtgccaggccgtattccgagtgctttttaatccccatgatgacttagtggcattggtactgttgttagcctttttttccagatggggaaagtgaggcaaagagaggggaggtaacttgtccactgcctgttaatagtaagtggcaggggccaggcacggtggctcacgcttgtaatcccaacactttgggaggctggggtgggcagattgcttgaggccaggagttcaagaccagcctggccaagatggtgaaaacctgcctctactaaaaatacaaaatcagcagggcgtagtggcacgtgtctgtaatcccagctacttgggaggctgaggcatgagaatcgcttgaacctgggaggcagaggttgctgtgagccgagattgcgccactgcactccagcctgggcaacagagcaagactctgtctcaaaaaagaaagaaagaaagaaagaaagtgcttattggccttttaaaaaaaatagtctcaaagctgggattgaacccaggccatctggcttccaattccatgctcttaagcgctctgtggacgtatcagatggctggacagggccaaaccggctgatctctctggggatgggaggaaggccctgccagcatggaaaggagcagacattcccattcctggtgctctgggaagaactacctccccacatccccagagcaaaggccatggaggaaaacctgaaggcaggaagaaagctatatggctggtcagctgctgtcaccctggaaagccctgggctggcttatgtaccccacctgcatgtgagttcagtgggcccattgtgcagacagcttggcagggaccgtgcagagtcactgttcccgggaatgcagcagctgagctctctgccctggagttccggaggctcctttcactcaagacagccctgtgacggtgatctgttgcacagatgaccctccacctgatgctttggagctggagacagatttctcttgggggcttgctaggaccggggtggggtttggggcatttggagttgggtgtgaggctgtggagccttgcagctgatggcttggagtcacactgcaggcagctgggttcgggccccaccctgcactagctgcatgacctggggcaggtacttcacctccttcctcaggctcttcatttttcaaatacctgcctcgttgactttgggctggagggagggataaaggatgataattcactgaggtcatcttatgcagagtgttcagtccacagacaggcatccacgtggctagaggcagggcctggggaaccaccacttccagctccagggctttaggcaagtggctttagcctccattgggctgcatttcctccttctacagcaagggccagagcagtcccaacctcttaaggctgcggggttcactgagtgagtaggtacctggggagtatttagcacaggccctggcactcaaggtaagtaagccccatggcatgagctgtcatgatcataatgcacaattaagaatgtcagcttgaggcctagcagtcaggcaaggaggaactgcacagataatatgatgaatagggccaggcatggtggctcacgcctgtaatcccagcactttgggaggccgatgcaggtggatcactcgaagtcaggagttcgagaccagcctggccaacacggcgagaccccgtctctattaaaaatacaaaaattttctgcacatggtggcacatgcatgtaatcccagctacatgggaggctgaggcacgagaatcacttgaacctgggaggtggaggttacagtgagctgagattgcgccactgtactccagcctgggcaacaaagtgacactctgtcttaaaaaaaaaaaaaaaaaattatgaatgggatggttctagaaaactccaagttggtcagctactcccctttggccttgaaaagtggtgacatgaggctccatgtggtttttgtgggcctgttttcctcctttcagaggagagtggcctttctggactgaagaacatgagctaaatggggacagcaaggaatctgggagtggaggtcctccagggctttgggaggctccattcaggtcgcctacgtgctggctctgtggtcagttgtgcagggcgagtgtgagtgcgggaagtcagcagacctgggtccctggtgctcccagctgcgtgaccccggcaggatcctcagactcgctgggtcagtgtcaggcacggtgctaagcacagaggtggtacccagtcaccgttggttgttctgaggacagcagaatagtgagggcaatggagggtgggccctatggtcagtcagctggattcaaaccctggctgtgtcaggtctgagttatgagaccttgaataagtgacttagccccctgcccctcagtttcttcatctgtgagatggggatgacacccacttcacatggggctgtggggatcacgagatgatctatatgaagcccttgaaccagctcttggcacagagaaagttctcattgtgcgttggctgtttttattgctattattattattattatttttgagatggagtttcactcttattgcccaggctggagtgcggtggcgcgatctcggctcactgcaacctccgcctcctgggttcaagcgattctcttgcctcagcctcccgagtagctggaattataggtgcacgccaccatgcccagctaattttttgtatttttagtagagacagcgtttcactgtgttggccaggctattattattaaaccatcctagaaagcatcataagtggaaagtgtaaatcgcagatacgttcaggggaacagatccctaacgggggaatctgtggagagctcctcctctggagggcttgttcagagctagcattcgagcctttgtgtttccagaacgtacctgaaaaagtgtgtgaaggaggggccaggagcgtgtcgaccaggtgtgatgttgtcttgccacggggacaggtttcccaaggtcagaggattccaccagattgttcaaggtgccgtatgaataaacacttgaagcattttaatagctgtacttttatttcaatgcatagcaggaaagtaatttcattttattttattatttttttttagagacgggtcttgctctgtcgcctaggctggagagcagtggcacaatcatagctcactgcagccaagaattcctgggctcaagcaatcctcctatttcagccttccaagaagctgggactataggtgtgcaccaccacacctggctaagtttcttatttttattttttatagagatgtgggtctcgctttgttgtccagactggtattgaacttctggcctcaagtgaccctaccaccttggcctcccaaagtgctgggattacaggcgtgagccatcatgcctggccgggaaaagaatttaaacagcatgtcaaacctagtatcccatggctatttctgcattgggtgaggctaaagttggtacttaagccaaaaataaaagtgagtatagttaaagtgtgaagtaagccgtagctcaggtgctctgggatatggtacaagtggcgccagtgtgtggagatctgggagacatggtgctaggagaaaggggtcagggctgggctgtgaagttgtttttcagcggtggaaaggctgaagctccctcaggaggttgctgagctgttcggccccctttgcctctctcctccttggctcttgaaaaccactgaaggtctgagcacagccactctagagtggagcagccgccctggctgctgtagtttcccacatcagaggtggtgggatggatgaggaaatataccaagtgtttatcgctagcgccttctcttcctgcagtgggatgtgagagctgtggaatggccttgagcagctacctgtgatagtggtaataatctttaaccaatgtgagtgagtgccaagcacttcccatgcttgatggcattgaaccctccctctaccatgtgatctttcgatctgtcagttgggacacactgggctgcaggtaacaagacgtctggtgactcctggctgagcagtagagacgccccattgcaaacatcctggaggagacaagctccatggctggtgcagaggtgctcacctggaactccaggcacttatgtttctgtgttcaaccctctgtgtgcaggcgtttcgttcgtgctggtggggttggtcattgtgtggtcatgggatggctgccccagcctgaggatcagatcctcagacacggcatcctgagctaggaggagaggagtaggggaaaggtttcctcttcacgtgcctttccgtttgaaagagaatatgttcttataaatacccctcctcccagcagacctctctttacattccattggccataaaggagccaggggccggccctagctgcaagggaggctggggcagcacatgtctgtaccgtgagagacagcaagagacaggggatggcagtggcatccgctagacaaccaagtgtctgctgtgggtgggtgctattaccacccttgctatagatgagagaaatcaaggatcagagaggtgagagaatggcttgcttggcatctcatacagcgtggagggacagagcagggatctgaagccatgtattcccacagagcctgcagttttaacccctgtgcagtgctaccttcctgagggggacacccagccggccataatgcagcgtggtgagtagatgagctgcaagtgcgggggaacacaggaaagagaaactcggcttgggcaccatcagggagaactgtgaagaggggtggttgggctggccttcgaaaggttagtaggagttctgccagatacacaggaaaatggcctgaggaggtggggcctgggcagagggcacagaatgaacaaaagcgggttgggacagtgtatgctgggtgggttaaggaagcctctttgggttgaaaggtgaatttgtcttatgtcactgggaagtctgtaggaggggagcttcagatgcagcccgagtatggggcccacacgtgccattggggctctccttggcttcgctctgccagcaggctggagtcgggcagatcctcctggtttatcaactcagtggaaagaggatttagagtcttcagtggtttgttttgttccgagacagggtctaggtctgtcacccaggctggggtgaagggcatgatcatagttcactgtaaccttgaactcctggcctcaagcagtcttcccacctcagcctccaaatagctaggagtacaggcatgcaccaccacacctggctgatttttaaatttttgggggatgtgtgtgtgtagagatggggtctcactacattgccagggctggtctcaaactcctggcctcaagtgatcctcctgccttggccaaccaaagtgttgggattataggcgtgagccagcacacccagccagtatttatttacttagagacagggtcttgctctgttacccaggctggagtgtagtggttcaatcagagctcactgcagcctcgacctcctggacacaaatgatccttcctcctcagcctcccgagtatctggatttacaggcgggagcccagcctttattgtttttaattgataagtaaacatcacatatatttatggtatacaacatgctgttttggtatgtgtgtacattgtagaatggctaagtcaagccatttaacataatgcattacctcacttgctttttttgtagtgagaacacttaaagtctactctctcagccattttgaagtatgccatgtattgttagtaattgttgctaccatgatgtacagtagctctcttgaacttatttctcttgtccaactgaagctttgtgtcctttgaccaacatctccacaatcctccactgccatcctctgtattttattttattttatttttttgagacagagtctcactctgttgcctaggctgtagtgcagtggtgccatctcagctcgctacaccctccaccttctgggttcaagcaattctccctgccttaacctcccaagtagctgggattacaggcacccactacgacgcccagctaatttttgtatttttagtagagacggggtttcaccatgttggccaggctggtctcgaactcctgacctcaggtgatccacccgtctcagcctcccaaagtgctgcgattacaggcgtgagccaccgtgcccggccaatcctcagtgtttttatactagccccagggaatattccatttgggttgtatgcctatccaagaaggtggtatttgggagtgggtgggggaagatgaggtagagatgctagatacacaacataatatccacaagtacatgtgcaacttttaatagataccttcgtcttctgtactttagtttccttgtctgaaaagtgggactaatacaatcttccctgcctcatacatagggtttgggaagattccacatggtaggcattcaccagtacagttagagaatgttctttgggccgggcacggtggctcacatctataatcccagcactttgggaggctgaagcaggcggatcacttgaggtcaggagttcgagaccagcctggccaacatggtgacacccgatctctactaaaaatacaaaaattagccaggcgtggtagcatatgcctgtagtctcagctactcgggaggctgaggcacgagaatcacttgaacccaggagatggaggttgcagtgagctgagattgtgccactgcactccagcctgggcaacagagtgagactgtctcattaaaaaaaaaaaaaaaaaaggccgggcacgttggctcatgcctgtaatcccagcacttcgggaggccgaggcaggtggatcacgaggtcaagagatcgagaccatcctggccaacatggtgaaaccccgtctctactaaaaatacaaaaattatctgggcgcagtggtgcgctcctgtagtccagctactccggaggctgaggcgggagaatcgcttgaacctgggaggcagaggttgcagtgagttgagattgtgccacttcactccagcctgacgacagagcgagactccatctcaaaaaaaaaaaaaaaaagaaaagaaaaagagagagagagagtgctctttggaacctagagcactggtctcccaattggtagaaggccccaaatggcaccttgccaggacctggtgttgccatttaaacttgggctgcttggattcaaatcccagccccagctggtaagagctagataaccttgggcaagtagctttacctctctgtgccttagtttccacatctgtaccagagagaagaatgcttagggcactgccaggcacatggtagacatcagtaaatattcttttgatgagtgcatgaatggaaaatctgagtcagaagcgactcacggcttgttaaacctttttggatttgtatcgcctagagtccctccagaaaagcattactctgttactgcaggctgagatgacccatttccctgttcctcagccagccctgtgtcttatcttctaggaaagaattcatagtaattttttccaggagtatgtggtaggacatagtaattttgattggtaatggaaccagcctaatattatggacatgtaagaaaatgtccatgtttttcagagctgcaaaccgaaacgcataaagttgaaatgacatgatatccggcatttgctttaaaatacttcaggccgggtgtggtgccacacatgtgtattcccggcactttgggagaccaaggtgggaggattgcttgagctcaggagttggagatcagcctgcgcaacatagcaagacctcatctctactaaaagtaaaaataaattaattaaccagacatggtgggatatgcctgtggtcctagctactcaggaggctgaggcaggaggatcacttgagcctgggaggttgaggctgcagtgagccaagatcacaccactgtagcagcctggaagacagagtgagaccctgtccaaaagtaaataaatacaataaaatactttggtaagaaggaaaaggggggaaaaggaagaaataaagaatagatgaagctaatatggcagaatcttgacaatttttgaatctaggtttgggtacaagggagttcattgtaccttactccctacttttttttagcatgttaacagaacaaaaaccagccctatctatcacacacacacacacacacacacacacacacacccacacacacacaaagactaaaaattgtgtgaccatgaaaagcactgcgatcctgctgcccacagacagttgggaaggtcctgagccagggtggcgatgggtaaatgaccaccttgcagttcttcgttcatcccctttgtgaggagaccttttctggttcagcaactggacagatagtggatttcaggccaaagcatcaatttctcatctctttcctgctgaggaggaggagaccaaaccccccagtgactgactcctgggatccctttcactgctgggcctggttttaccatggggtggagggagccacaagctgctcttctccagggacctgtgtgatgacggcaaaaacgtaactggccaatcttccacaatgactaaatattaactccagccccgctcctggacgcacatgagcagtcttgcccatccttgttaaacaggcaaccgccccagccttctctctagttgcacatggaagtgagtggtgggctgggttttccagcgctgaacgtgctcttcattccgctgcctgtggacgttagggaggggcttccgcagtccatctggcactgggtgggtctcagtccgggcgggcgatccacccaggaactgacccctggttgctccagaaaggtcatcgtttaagaatgtttcttgggtagcccagtgggagacccacgtgtgcgtgtggtcagctgtagcttccggctgtctcacttctgctgaattccagcaatttctcatttcctttaggaaacaggatgagtctggagaggagtatgaaaaatcatgacaaacctggcgatagggacactgggaacctagccctgaatgaagcttatagttggtcatgattgccagggtcttgaacagtgtggaccaggggaaagaaggtacctggggccagatgccctggattcaaatcccaccacccccactaacacttgtgaccttgagaaagttgcgtaacctctctgtgcctcagtttgctcatttgtaaaatgatgatagtacctgcctcgtaggatttaaggattaaattagatactgttttttaagtgtttgaaactgcctcttctgtagtagttcctcaattaatagtggctatgacagtattatcatatcctgttgtaatgggcatgcacagttaggattaagaacctttggtcagctaggtgtggtggctcacacctgtaatcccagcactttgggaggccgagacgggtggatcacctgaggtcaggagtttgacaccagcctggccaacatggtgaaaccctgtctctactaaaaattaaaaaaattagctgggcgtggtggtgggtgcctataatcccagctactctggaggctgaggcaggagaatcgcttgaacccaggaggcggaggtttcagtgagcctagatcacgctactgcattccagcctgggcaacagagtgcacagagtgagactctgtctcaaaaaaaaaaaaaaaaaaaaaagaacctcggtttataaatagtggttcagatggaagcagaaattagaggagaggaagagggaagcacttttctccccagcagtccatggtttgaggaaataggcttaatttcatcgttgaaaaatgttatttttcactcgatgttcaaaatctcctaggaaagcaggggcaaaagactttttttttttttttcctcctcatgcttggtcatgcaaaagactttaaagagagaaaatgtctcttccccacttctctatatacatgctgggaaaaaaaagactggaaggaaatgaaccaatgtcttaacagtggttgccctttggtggggagagaatgagtaactctataatcttctttgtacatttatgttccaagttttttatatatatatatatgttatatatatatatataacatatatataacatatatataacatatataacatataacacacatataacacatatataacatatataacacacatatatataacacatcaatcatatacacatatatatcacacacatatatcacacatatatcacacatatatatatatcacatatatatcacatatatatatactactttcataaacaggaaaaatgttaaaaagttaaggaatcatgtgagcttggcttctggggaggttgggtggagttacttcagaataaagctctctgcttaatgtttgagtgtccagagacgtttgcaccccacccttccttaaggtgtacttgaggcctattaaatttctacctagaaagttcttgatatcaaagatgatccctcaaactccattcttccgcctgcccagacttgttctagatatttatcttctctcccacctttctcttgagatgaaagaactctaattcttttgtggttcttctgatcttgcaaaagaaccacattttttaaaacttaaaaaaaaaattctgagacagggtcttgccctgttgcccaggctggagtgcagtgggaacaatcatagctcacttcagcctcagcctcttagctcaggtgatcctcttgcctcagcctcccaaatagctatgaccacaggcatgtgccaccatgcctggttaatggtttttattattcgtagagactgggtcttgctatgttgcccaggctggtctcaaattcctgggctcaaagcaatcctgccgccttggcctccccaagtgctgggatcacaggcatgagccaccgtgcctggccctgcagttttttagtacttttttattatgataaaatatgataaaatgtacataacacaaaattaaccatttaaaacttttattgtggcacaatatacataacaaattttttttatattttataattagctttagcttgattgtggtgattttgtcacaatgtatatgtatatacaagttgtccaccttaagtatgaacagtttttatttgtcagttatacctttaaggaaactgtaaaaaagaaaatatgcacaactcatttagtaacctagaagtcaagtgtttaattttctgaaattttattatgcccagttacattactgatagatatagttaccaaaaaaatgtaccttacgtgtgcagttcagtggcattcagtacatgcacatggttgtgcatccatcatcatccatccacagaacatttttcatcttgtaaactgaaactctgtctctgaaaaacaatattctccatccccaagaccccagtccctggaagccacctttctattttctgtctctatgagattgacgaatgtaagtgtctcctatgagtggaatcatccggtatttgtccttttgtggctggcatattttatttagtatcatgtctttaaggttcattcatgttgtatatatcagaatttccttcctttatgaggctaaataatattccaattcatatttaaggctaaataataatgatatgtatatatcacattttgtggccaggtgcggtggctcacacctgtaatcccagcactttgggagtctgaggcgggcggatcacaaggtcaacagattgagaccatcctggccaacatggtgaaaccctgtcggtactaaaaatacaaaaattagctgggagtggtggcgtgcgcctgtaatcccaggaggcaggagaatcgcttgaacctgggaggcggaggttgcagtgagctgagatcacgccactgcactccagcctggtgacagagcgagactccatctcaaaaaaaaaaaaaaaaaaaaaaaaaaatttatatgtatatatatatatctcacattttgcttatctatttatctgttgatggacacttgggatgcttctaccttttggctatagtgaataatgctgctgttaacactggtgtgctggcagggcacagtggctcatgcctgtaatcccagcactttgggagccaagacaggtggatcacttgaagccaggagttcgagaccagcctggccaatgtggtgaaacccgatctctactaaaaatacaaaaaaattagccaggcgtggtggcatgctgctgtagtctcagctactcgggaagctgaggcatgagaatggcttgaacccaggaggtggaggttgcagtgagccgagttcacacactccagcctgggcaacagagtgagattccatctcaaaagataaaataaaaataagactgaaaacaggagagtttattcagtaaacatcaactgaagaccctactctgggccaggcaccaatgagcaaggcaggcacagctcctccctggtggagcccacagccagggagaaaacacaagaaccgcagagccatatggataagtactgtgttctgcgtgctctgaagaagaatgggatttttcaagctgtagtacagggagattcacagaggctccccaaggaagtatagtttaagtgtcattttctgggtgcaaatggaaaacgtgaatttggtgtatgtctctagataagccccacttctgaatgattccggctgtgggcagggatccccagatgggcgttgctatggaagcagcttgcacctctcacttcctgacttgagtttatttccgagtttcccgtgccaccgccagttcccagctgtaaatacagacgtggcagggtccctttttcctgctgcctcgtagctgcccagagaacggatgtggctggaatccagcccaggagcctcctcccgagagagctcgttgtggaacctgccatgtggcggtttctcttccatcccgcctctttcctttgtcctctctcgggactgtgccagcgtgccccagcctgtgttttgaaactttagaccccagcttgtatttggtagagaaatgagctcatgagggcttcctccgccacccagcaaccgggaagttgagtcaaatctctttcatttcagatccatcccccacccccacccccaggccagatttgccacccttctgacagaaactgggttagctgttctctgggactgtttgtgaggaggggacttgttgacctgaacaaaggaactacaaacaagacaggggagggatgtggctgattgctcactgggattgggacttttcagctacccttcagtgctttcgaatagtaattgctaacgtgttgagaatttacagtgtgctagacagtctttaaatcacttttaatccatttaacagctcaatcaagtgtatataattatccccattctagagctggggaggcggtgggcaagttcggcaagttgagtcattggccaaattcctgtactgcagcaatttaggcaaaaagtgggcatttaaccagaggctcctggggcggcccagagacctgaagaaagcctcaggaccagtcagttacttggttgcaagtaacaaaaacaccaactcaaatagacataaattttaggggaaaggattggctcattcaactggaaagcccagaggtggggcagatgtctgggctggctggtccaggagcctggggctattgccagtgacccattttccttctgtctctttattgttccctctgatgtcagtgtcatcctcaaacgtggctcccctgaaagttgcacaccagctgccaggacccgctcaggcttgtgtccttatccctgtcctgaaagaaaaagaaggtatctgtcccgaactatcatgcaaaacctcagagctcctgtctgattggactagcactggtcatgtgatcttccccgaaccaatcactaataagaggggtgagctcacactagcaggctggttgcaaaacctgccatagaggaagggcgggctgggtgctgggattggaaccaggacacacatgccactgtatctgcattctcttcctcacttgttcactccccacctctagatctgcgttattcattctcttatattcagtctgtctttctgctttgtattctactggacaggaagcctggccatcacagactgctgagcaatacacgtttcagtacaggcccccagagagagtcaccgcatgttctctcagcccgagtccaaaacaacccgaggagtggaggatgtctccctccggactaaccggggccgaggaaagggttcttttgacaggctcagctgagtcagatgtcccccacccacccccggccaatcagctacaggcagggatgaagtcattgctccctctgtcccctgccacgtgcctactataacatcttcataggacctctaagctggaatcatttaagcaggatgccaaaggacagcaattgggccacacttcttgactgtagtgacactaaaacctcattgcaactctctacaggaaggccagctcttcagtgtggccccccagaccctgcttgctctggcccctgcctgccacccgcccccactcccgcctcatcctgcagatccctgtgcactgcgctccagctgctgggcctgccttccttgaatgcaccatgtcttcgccttgctcctgggctgctttcttggttctcccaccgtgctgcccactacccctgcccttctggcctggctgatgccgactcctccttcagatgtctccttcaacacactcccagggggttgctccgaagcccaccccgcccttcttccctgagctactcatctgacctgatcagggcttccccctccccttaatgtcagctccataaaggcaggaaccaaatctgttttgttaaaggtatgaccctttccaccaaatatgctccttactaaactttgctaagggaatgaatgaagtgataatagtgacataaggagaaagggaaagcggagcacagtgacttgcctgtcactcagctaggaatcctggcactgtgggaggctgaggtgggcagactgctgcaggccaggagttcgagaccagcctggacaacatgctgaaaccccatctctacaaacaatacaaaaattagctgggcattttagtgtgcacctgtggtcccagctacttgggaggctgaggggggaagattgcttaagcccccgaggttgagctatgatcccaccactgcactgcaagcctgggcgacagagtgagacgctgtctcaaagaaaaataaaagcacccagataaacaggcggtgaatggtggaggaaaaaactgggtgccaagacatcatgtaactagttggggaggtgatgctggggctgagagcatcagtcaaagtttgctggtctaggggagtggtggtggcaggggtgagtccagggtaggggttggggactgtatataaaaagagcctgaggtggggtagagccagtctcgaagaactgaaaggcccgaacctagaagcagcatgagtgaggtggggatggagcagtagaaggtgcaagaagcagacagggccaatcatgcttgaccttgcaggctttgcagggtgtggggcatcacgccttttaccttctagggagtggggcacgttaagagagggaagagggcaagaaaggtaggagggctttgaatattggcatgagaatactctccagggagatgacagtcccccacactgacatgggcagcatctgtagaaacaggaaatgcgtctcagacacatggaaagatacctgactctgggcgtaataagagaaatgccaattaaaatcatgccgagatactacttcgcacctctcagaagggcaagagcacaaggcgtgcgcacatgctgtgggcagtggtgcggggggcatccaggcttctccggagctagtgggagggaaagcagaactgtcgctttggaggggactctggccattcctgtgagtatgaccgggcacacacccacctttcaccccggcagctccacttctaggaagcttcacctacacatgttcccaagtgtgagaagtgatctttgtccaaggttattcattacagcagtgtttgtcagagcagaaaaggggaaatggcttgtgtgtgccttaataaggcactagaggaatcagtcgggtttgtctgtgcagcggaataccatgcggccgggaaggtagagtaaggccctgataagaggggccttccgtgtctgtggtgctgctaagcaggaaaacgaaaagaacgcgatggctcccgcctataaccccagcactttgggagaccaaggcagacggatcatttgaggtcaggagttcaagaccagcccggccaatgtggtgaaaccctgtctctactaaaagtacaaaaattggctgggcacggtggctgacgcctgtaatctcagcactttgggagaccaaggcagacggatcatttgaggtcaggagttcgagaccagcctggccaacatggtgaaaccctgtctctactaaaaatacaaaaattagccaggcgtgatggcacgcacctgtaatcccagctactctggaggctgaggcaggagaatggcgtgaacccgggaggcggaggttgcggtgagccgagatcacgccattgcactccagtgcagtgcaaaagtgaaactctgtctcaaaaaaaaaaaaaaagaaagaaaagaaaaaaacaaatattgtatttgtaattgcccgggggaggggggattttggaaaatgtgaggagaatataggttttgtgaagattccaatgccagtcagccctggagcactcttcattatttattattattattattattattaattcttcttctacctttttttgcttaacttaagcataccctgttagagcactcttaactgtcaaattagatcaccttcattttccataccaggcactgtgttcttggctacatgtgtgtaagtatcttggtgtgtgtgtgcatgtgtgtgcatgtatgatttagttactttattgagatctctgagacaccatctctgagcggccttcctcagcaccctgtctaaaatggccctccctgtcgctgtcttctgctttatttttcttcatggtgtttatcacggtctgatgttctatatttgctttctacaccatcctccttggaatgtgagctccgtgaaggcagggatctttgtctttgttcctttctgtatccccagcgtctagagcagtgcctggcccatagcagttgcttcatgagtgcatgttgaatgaatgtgagtgcgtctgaagactgaatgttatcctcctattgcagatgcggacctcaggcccccagaggccttgccctcttttcatggactctaagaaatgaagaacaaactgcaaagcccactggtgttctgactggggaagaggtgagaaatcaccataggctgcttttttttttttttttttttttttttttgagatggagtcttgctctgtctgccaggctggagtgcagtggtgcaatctcagcttactgcaacctctgcctcccgggttcaagcaattctcctgtctcagcctccctaatagctgggactacaggcacctgccaccatgcccagctaattttttgtatttttagtagagacacggtttcaccatattggtcaggctggtcttgaactcctgacctcaggtgatccacccacctcagcctcccaaagtgctgggattgcagacgtgagccaccgctcctggctaggctaccttttaagctgttaaaattctccctttacccccattccttttcctttcttttttttccccttagagacagaagtacaatgatgggatcatagctcgctgcagccttgaactcctgggcccaagaaatcctcctgcctcagcctcttgagtagctgtgactacaggtgcatgccaccaggcctagctaatttttaaaaattttttggtagagacagggtctccctatgttgcccaggctggtctcgaactcctggcctcaagcaatctccccagctcagcctctcaaagtgctgagattacaggcatgagccaccatgcctggccacattcctttttcaaagccaccttgagagctaggaatactagctgggtctcttctgctgggtcctgcctgtgaagcactgaggagcatgcctgcaccacaaaatttctccagctgtctggggtccatctctccttcttgcttgagcgacccttgttctggcctggtttttttttgttttcgtttgtttggttttgagaggagtcttgctctgtcacccaggctggagtacaatggcatgatctcggctcactgcaacctccgcctcccgggttcaagtgattctcctgcctcagtctcctgagtagctgggattacaggtgcctgccaccatgcccggctaatagagacggggtttcaccacgttggtcaggctggtctcgaactcctgaccttgtgatctacccgccttggcctcccgaagtgctaggattacagggatgagccaccgcgcccagccctattctgggctattattccatggagaataggtagagagagaaggaaatttccagtgtggaggcactctcctctggagggacccctcacttaggctgtgtgcttaatcttatcagagtccaatttgcccaagagacctcctcagacatgaggagtcgaggatgttgtttatttcttcagtatttccgttgtaataacatctttgccagtgtgcttttgagggtccttctgtgccagttacttttccaaccgttcaattgctgttacctcatttaaccctctcaacagccctattgagagtggatattactcctcccaccatgttactgatgaggaggcttgggattctgaatgggctggtaaccagccacacgtccacaggatgctaagccgcagacctgtgatttgattctggctctagctgaccaccaagatggcgctccctggcctcgttgccacactgcttccccatctgctttggggattttcccagtgaccaggaggacagggtctggttttctatgacggcgtgatatggatggttaatcatgtcgcaaagccctgctgtccagcatgaggctttggtgggttggaggaaggtgggtggagagcctgctgcttgtttctcacaggtgtttgccacacaagagatcaaacttctgtttcctgttgagattggtttccatctctctccattcatctctgacactccctatctctcttaattatgtcttatactgacgtctataaccctgctcagccctctccctccagaccccctcccagcagcaactgctgttagtagagctattaagaacacaggcctgtgatctcagcacttgaggaagccgaggcaggaggattgcttgagcccaggagtttgagaccagcctgggcaatataaggagactctgtctctactgaacataaaaattttttaaatgagctgggcatgttggctcacgcttataaccccagccctttaggaggctgaagtgggaggatcactgtagtccaggagtttgaggctatagtaagctaaaatcaagtcactgcactccaaccaaggtgacagagaacctgtctctcaaaattaaaaaaaaaaaaaaagggtctgggcacggtggctcactcttgtaatcccagcactttgggaggctgaggcaggtggatcacctgaggtcaggagttcaagaccagcctggccaacatggcgaaaccctgtctctactaaaaataacaaaattagctgggcgtggtggcaggcacctgtaatcccagcaactcgggaggctgaggcaggagaatcgcttgaacccaggaggtggaggttgcagtgagccgagatcgcaccattgcactccagcccgggcaacaagagcgaaactctgtctaaaaaacaaaacaaaacaaaaaagaatgtacacactctggagtcaggctgcctggatggagcctcacctctactgttacccactgtgtgaccttgagtaagtgactctgagcctcatgttctcccctgtaatataggggtaataataacacaaccttcttccaaggatggttgtgagtattcatcaagattgtgctgaacccagggtacaactcatggcaatgaccaacaaacagggtctctttctatgcacacagaaacgtctctccttacacagtttgtttctttattcactgagaagacatggatgtgcgcagatatatcttattttttcttagagctgctagaacatttatttagcagatactttcttgtgagtggcagcagtcttcaacagtctaggtatccattgtgaacaaggtgagagccctgtacccatagagttcatatattcatcagcaagacataataaagcaatcagtgggtcgggcctagtggctcacacctgtaatgccaacactttgggaggccgaggtgggaggatcgcttgagcccaggagttcaagactagcctgggcaacatggtgaaaccccctctctacaaaaaataacaaaaattaaccaggcatggtgatgtgcgcctgtagtcccagctacttgggaggctaaggtgggggaatcacttgagccccggaggtccaggctgcagtgagccatgattgcaccacttcactccagcccgaacagtggagtgagaccctgtcttgaaaaaagaaaaacagcagtcatgcttactgctctgtaagcaataaaagtagattgaagtaggggccccctgatctgggtggtcagggaagacctccctggggaagcctgccttgagaatagctagagccacacgtgcaaaggccccagggcaagcatgaaattggaaggtcaaggcagccagtgtggcgggagcatttgggtgatgggggaagatgatgaggcccaagatatgttgaagaactttaagctggaaagcagctggaggtgatccctgtttgatgtaatccttctggctgtgggtggagaatagaatgtaggaaggcaaaggtggcctggggaggccagagagggatctcatgaagttgttaggatgaaagatgatggtggtggcttggcctgggagggagaaagaaaggaaatgaattcaggatgtattttggaggtagtggcaacagagtttgctgatggccttgctgtggaggatgagggaaggagggacaggaaggattctcccatgtgtctgcatcattgctggatccctgctgacagacacacaggttgtctcctgtgtctcccaacatgcatgaatgcacatccttgctgggctgtgtctttttttttttttttgagacagggtcttgctctgtcacccaggctggagtgcagtgatgtgatctcggcttgctgcagcctcgaccttcccggctcctggctcaagcaccctcagcctcctggatagctgggaccacaggtgcatgcccccatgtccagctgatattttttttttggtagagatgggggtctcactatgttgcccaggctgatttcgaactcctgacctcaagcgttcctcccacctcagtgtcccaaagccctgggattacaggtgtgagctaccgtgagtcttaagggatgaagggcaagggcatttcaggtggagggaagcatctaagtaaaggctggggccctgttctggtgctgtacagggaacctcccctgctcccagcccagctcaggccagagtgtggggtgaggggcagaactgtctcctgggctgtggaacagcagcatccaacctcaatccactacccgaagcatgtggagttgctgcccattttgagattctttcatgtcctccatcccccgtcttctccagagctgctttctcatctggccaagtccattccccccaccccccatcctctctcctccccaggtgagtccagagtttcagctaatgttgcagcggcagatgcatcacattggatatcctgccattctcgggcccttgctgtctgcatttaggtcagctttgttttcctggggattgaaagcagtggctggtgtggcctttggttctgggccagcctcacaaggaggctggacctgcaggaagtaaacgagaggcctcttgtttgtatgaacttgattcttctaccatctttgtcccctgttcccttctgtgtcttgtttctggccttgttcttgagagtgcaggtcccacaggcagtggccagtgctgcaggcctcctttaccctttctgaggggctttgggcatctgggggactctagtccactcagccagtgagggcagcttggtcagtgtgagtttaaaacagcatgacctctgagctcccgttgcctcctgctccgagtttctctctggcgctgctagcaggtgctgggccaggccacttgtccaaattagcatctctgagagtttgccttctgcctacccaagggctgtagaataggtgtcacagattacaagaaggtaaaagttgacacatttcagctcgtaccaggtccaaaaagcaaagaacgacctgaaggagaaaaatatagaggattaatgagctcaactgagtaccctcccaagttgctggaggacatgtgaatcactgcagcctttttagagcatgggctgaaaaaaaaaagttttatgagccagtacatgcgtgtgataaaacattcaaatggtacaaagaaggtatacaatagtcttcttcccctacttacgatctcccagtcccctcctgtgaggacacccatgtcacacatgttcttccagagatgagatgctcaatacaaaaacaagcatgtattatatgtgcagttctgcaccttcacctggaaaccattccgaaatgtaaccatgtaatttttcataaacagcctttgacccagcactgcaactcctgagaatctaccatgcagaagaaaaaaacaaatagcctgagtagaaaaggatatttattgcagcattgtttgcagtggcaaaacaaaaaaccctggaaataaaacaaatgcccatttttcagggaatgattgaataaaatatggcacatctgtactcttggcctatcagctgctaagaagagtgggtaggagcactgcttgctggcctggaggcatttctgcgatgtatttaagggaaagcaagattcagagaagtaaatttgataagatcctgttgatgtaaaatacagcgacaaaagtcattgtcattttgttggggacagtgggtatctacttcattctcttccacgtcacatggcctgctcagcccggcattctgcctgggagaccttgccaggatccttacttgtggtcagagtaaacttcacccactggtcattattagaggcctgtctgcgagcatcctccacccagccacaggtggagagcccatggcattcgtgctggtaaatgctcacctgggcctctgtcaggctaggagagaccagcctgttcctgggtgccaggtgccatggtgagaatcacttctcactgaccatggcaggcaatctgactgatttcccagtcacttggtgggatgaactaagcggagtttggtgagccgtgaagcgtgcagcaccaccaaatctgccactcatgagaccagcacagaggaattacagaaatgttgaagtcaggacatcagatctcgggctgtgttccagctgaaggttctgggggcagaaagcacaggcaacaacttaattcacgtccaccccaagctcagcacacagagccacccgatggaatgcttctcacaccacattcttttttttttttttttttttttttaaataagagggtcttgctctgttgcctaggctggagtgcagtggtacaatcatagctcacttcagcttcaacctcctgggctcaagcgatcctcccccggctaatttttttttttttttgagacggagccttgctctgtcgcccaggctggagtgcagtggcgcaatctcggctcactgcaagctctgcctcccaggttcacgccattttcctgcctcagcctcccgagtagctgggactacaggtgcctgccaccacgcctggctaattttttgtatttgtagtagagacggggtttcactgtgttagccaggatggtctcgatctcctgacctcatgatccacccacctcggcctcccaaagtgctgggattacaggtgtgagccaccgtgcctggcagcccagctaatttttaaagatttttggttgagatatgatctgactgtgttgcccagtctggtctcaaaactcctggcctcaagtgatccttctgcctcagcctcccaaagtgctgggattacaggtgtgagccaccacgcccagctccatgccagatttaaatgcaagtatcagatcatttcactcattggaatcactaaatgacacagcctgcatttcctggcttatacgtatatatgtcattcattcttaccagaatagtggaaacgctgcacaaaaccaacttaaactgttttcatttcatattttggcatgtgcacattctaccaatattctacttttgacttactgatgacgaagcaatgatagggaaaggaactgtgggttaccgtatctttctcttgccttccatgtcattgttctgcatacctagttggctaattcagggaagtgtggcaagtaaaaaagaatgtggccaggtacggtgactcatgcctgtaattccagcactttgggaggctgaggcgggcagactgcttgaccccaggagtttgagaccagcctgggaaacatggcgaaactctgtcactacaaaatatacaaaaactagccagggatggtggtgtgcacctgtggtcccagctactcaggtagctgtggtgggaggaccacttgagcctgggaggtcaaggttgcagtgagctgtgatcaggtcacagctctccagcctgggtgacagagcaagatcctgttaaaaaaaaaaaaaaaaaaaaaaagaatgtgagaggtctccatggtcttcatgtttctttctgcatttcatgtttcattgccttctttctgctgtgttcgaagcaactcctggctctaatggaggggcctctggggactgtcagtgtccctgcttactcccttgtagttgtgataatatgcttactttatactttttgctttcaatcttgctgaacttgcatgcatcgttggtccgccggaatctgcgctcacaggggatcaggaatactgtatgaggatgccatgactaggagtgacaggcacacacgtggctcggatctcttctgctcacatgcatgctccattggccctggacttcacttacaaaatacaagttcaaagataaaatgatttagaatttcaagatggcaacagagcattagaccaagggaagggctcacagcttctggggtcacacactcataaagctagccccatctgggtttgttgcatgaagtaacaaatactcaattggagatagggttctgttaccaccccagttttaacttacctgacttggagtaatagcgtttcatgctaggacttaaaacacttctaaggccagctctatttttagtggactatatatacgaatcaaaacatagtcagtatccttacctgtgcctgtttttctgccatccactggtgggtagtggtccatattggcagatgacatcatcaactacccatttattcaaaccagaaacatacacacatataggtatacatactgtgaattcacgtcttcttttttgagatggagtctctgtcgctgaggctagagttcagtggcacggtctcggtgcactgcaacctctgcctcccagagtcaagcaattctcctgcctcagcctccccggtaactgggattacgggcacatgccaccacgctcagctaacttttgtatttttagtagagatggggtttcaccatgttggccaggctggtcttgaactcctgacctcaagtgatcctcctgccttgtcctcccaaagtgctgggaatacaggtgtgagccaccacacctggccttaaagtgattatcgatatatttggttaataccggtcatgtttgtaattgttttctgctccttaccagatacttctttttctgcctcctctggcttttttttttttttttttttttttttttgagactgagtctcactctgtcacccaggctggagtgcagtggcgtgatctcagctcactgcagcctccggctcccgggttcaagcaattctcccacctcagcctcctgagtagctgagattacaggggcacacgatcacacctggctaatttttccatttttgatagagacggggtttcaccatgttggccaggctggtcttgaactcctgacctcaggtcatccacctgcctcggcctcccaaagtgctgggattacaggtgtgagccaccttgcccaacttcgtgtctttattgaaaatacaaaaataggcccttcaaagaaatagagcagtgactttgtttattgaattcatgtaacaggcatttgcggaactgttcttgatattgtgtcttactcaatttgaatccagcagaaaatcagtttggaaaaaccgatgagaccctctgaaggtcattcttaaatcttccttttctaccacacacccatggccagtccaccagcaaggcctgtttgttcctgagcctaaacaaatcttcaccagagttctcctttccttccactgtcctcaccctgggccaccaccatatagcaacagctatctcctttttttttttttttttcttttgagacagagtcttgctctgctgcccaggctggaatgtggtggtgtcatcatagcttactgcagtctcgaactcctgggctcgagtgatcctccagccctcagcctcctgagtagctggactacaagcatgtgccacatgcctggctgattttttttatttttattttctgtagagacagggtcttgcagtgttgcccagtctggctttgaattcctgggctaaagcaatcctcccatcttgcctcccaaaatgctgggattacaggcataaaccaccatgcctggcctctctctgcttcttttgaacactgacaatctctgtgaaacagccagagggatctttcaaaactgtaaatcagaacatatcattcccctgcttcccatcacactaaaaagcatgtggctgactgcggccacacagcgcctcgagcaccagctatgtcttgaggcacaccctcccttgctgcagccatccagccacatgggctccctgcgtgtttctttgaacagactcatgtatccttctccatctcctgggattctctgattttttttttttcttagagaatttattaccaatctaatcattcagtctggatagccctttgagtgtcttttttttttttttttttttttttttaggcagagtcttgctctgtcacccaggctggagtgcagtggtatgatctcggctcatggtaacctccgactcccaggttcaagtgattctcatgctgcagcctgcagagtagctgggatcacaagcgcgcaccatcacgcctggcaaatttttgtatttttagtagagacggggtttcaccatgttggccaggctggtctcaaactcctgacctcaggtgatctgcccgcctcggctaggattacaggcgtgagccaccacacccagccacgaatttactttctatctctatgggttcgcccattctggacatttcatgtaaatggaactgtataatccatggtcttttgtgaccggctttcactcaacatcatgttttcatggcccatccatgtcacgcatggattcttgcttcattccttttatggctgaatattccattgtatggaggtaccacattttgttaattcttcagctaatggacattctgggttatccttactcccacttttcacatagcttccttctgctttttctttagttctgggcttaaattcattctggttctcaccactgaacttatatatgtacctgtttgcttacttctttactctggtcccctagtctggacggtacattttgtgagggcaggtacattttgttcaccgtacctagcatcctaccccacacagtgtccagagtgaggtagtgcccattattgaatgaatgactcaacatctcatatatttctcactttacctctccctaaggcaaagtgatcgtaaccccactctgtatctgggaagttctagctttctccctggtgttgaggagagcaaggcatcctaaagcatgaggatactttaaatagtggcaggttactagaaggatttctttggtgtaaaatactgtcccatcactcatctgctatgcaagactaccggctcatttgaaaagcccatttggctgccagtaacagacaccagaaataacagtggtgtaaactcagtggaaggcagtttctgtcctgagtaagacatccagagataggcagtccgtgcctggtgtggcagcttcacagtcatcaagaaaagcagagtgctttgatgcagggtccttctgctcaccatccctagcacagggcctttgtccttaaggtggcttcatggcccagtgtgactgctggagtcaagctagtgagtctggagtccaggtgggaatagggtgagggagaggcacaaaagcatagtccagctttgcgtttctgctgaggaattttcctcaaagtcccacagcttgtatttaccttgcattggccaggctggctgcaagggaggttgggaaatgtagtcttagctgagcatcctgagaaggaagagaagaatggctgctgggtgggcacttagcaactggagttgatacatttcctgcccacagtacccaggtccatcatagccagcttctgcccattggcctggaccttcaagccttaagtgaccagaatcagagcacggactttctgtgtgtgtctggttgaccagagggtgggattttgaggcttgtcaaggagcatcagttcaagaaacctaccatatcaccagctataagaataatggtagctctggccaggtgtggtggctcacacctgtaatctcagcattttgtgaggctgaggcaggaggattccctgaggtcacaagtttgagaccagcctgggccacttagcaagaccatatctgcacaaaacttttttaaaaagcattacccaggtgtggtgatgcacacctgtagtcccagctactcaggaggctgagacgagaggatcaactgagcccaggagttcaagactgcagtgagctatgactgcaccactgcactccaccctgggcaacagagtgagaccccgtctctctctctctatatataaataaatagaataatggtagctcacacttaatgcatacttagtgcataataagtcttgttctaaacaatttttgtggagtaatttttttacttaatcctcacaacacccttactattatccccattttggagatgaggaaactgaggcacagagagggtaagtcaccgtagactttctcactgttagtaattttttttttccgttcattcttccctttcaatgtgttatgaataagaggattacaaaataaagcctgacctattttggtagattgaccactgttctgtcttccatctgattagctggggtctggagagtgctttgtggaaaagcacccaacagtcgaaaccacattgacaggctgttttcataggcgttcaggaaggggcttaactgttggcacatccagcaaatggctggtgacaggaagaaaaaggatccacagctatgcaggatttccgcagcccctgagcctggggccagccgaccacagtgcctgtgtgccagtgggctgggcctggcctttaaaatgacagtcaccctggctgcccttagtagtgtgttaaggagaaagaagctattctctcttcaggtccccaagcattaattcgggcaccaggtcatctttctagctgcctctgatcagccatgctcagtggaaatctttgagtcccacaattcatctctgagttttttttgttttttttttgttttttgagatggagtctcactctgtcgcccaggctggagtgcagtggcactatcttggctcactgcaacctctgcctccaagcaattctcctgtctcagcctcccgagtagctgggactacaggcgtgtgccaccacacccagctaatttttgtatttttagtagagacagggtttcgccatgttggccaggctggtctcaaactcttgacctcaggtgatctgcctgcctcagcctcccaaagtgctgggattacaggcgtgagccaccgtgcccggcttttagctgagtctttctgagaccccttcaggtccatgttggtggctctctgcagactctccagggtggtggcacagcacgtggcccccggctgcagcaggtgtttcagttaggaatgattcagccgcagctagcagaattcacaagagacattgtcacctcaacacataggcggtcctttgtgtcatataacaatgtctggagagagaggctggcaggttcagtggctgacaggtcaacaccagcactgctctgaccctcttgccgccatggccttaagacagctgttggacccagagaactcagcccttctagtctgggcagggtagttctggggacaaggggactctctcaaatccagctatcacatctgcatatctgcattccaagctggagaaaaggcagactggtgaaggggaaaatgactgttagatgagtctgatccttttttttttttttggagacagaatcttgctctgtcacccaggctgcaatgcagtgatgcagtcatggctcactacagccttgatctcctgggctcaagtgatcttcctgcctcagcctcccaagtagctggggctacaggtgcacatctccatgcctgagtaatttttctatttttctttaatagagatggggtcttgctgtgttgcccaggctggtctctaactcctgggctcaagcaatctgcctgccttggcctcccaaagtactgggattacaggcgtgagccactgcaccccgcgtatgaatccagtcctttttgtgaggagaggggaaatgcttctctagaattcctgaatgagaaacctttgccctccccaaggttctgaagatacgcacctgtgctgtcttctagacatgttcatatttttcctttttcatttaggtctttgacccatctgacattgatgtctgtatatggaaggagacagagttcaaggctaagctcatactcttcactgttgcatttagtaggcaccattgttggtggttctagagccagacccgctgggttcaaatccctcctggctgtgccgtctacttgctgtgtgatcttgggcaaggtacctctctgtacttgagttttctggtctgttaaaaatggagatcatagtacaacctacttcacaggttattaagaggtttaaatggattggtagttaaagaacagaaaacagagccgggaatggtggcatgcaccagtagtcccagctactcgggaggctgaggcgggaggatcgcttgagctcaggaggtcgaggctgcagtgagctatgattgtgccactgcactccagcctgggtgacagagtgagaccctatctttaagaagaaaaactgtaatcccagcactttgggaggtcgaggcaggcagatcacgaagtcaggagattgagaccatcctggctaacatggtgaaaccccgtctctactaaaaatacacagacacacacaaaaaaatcgggcgtggtggcaggtgcctctagtcccagctactcgggaggctgaggcaggagaattgcctgaacctgggaggcggagcctgcagtgagccgagatggtgccactgcactccagcctgggtgacagagcgagactccatctcaagaaaaaaataaataaataaaaaagaaaaaacaaaacacaacagaaaacagtgcctggcatgtagtaaaatcacaacgaaaaccttgtgcttcaacccagaaagaatttgcacagccgcacatgggtctgggggctcagcagggagccctgggcctgtcagtaggtgaagtgaagtttgtcactgaggttaccctctcttcatctttacaagaagttgccagatagctctcccaaaatgtttgttcccatttccacccccacccgcagtgactgagtgttccccttactccacaacttcagcacatttggtgttgtcagcctggcatttcggccaatctgctgtgtgtggaatggccacacagcattttcttcccagagcagcttatctgcagaggtctgtctgtgagcccactctaccacggagttacttaggctgggctggaggcaggaccaccgtggggcccccagcacagtgaaatcctcatagctgtgtgttcagagcaccacactagcacgcctatcttctggagagggtgaggcggtggggccgggggtcagggggtacaggaaatgagaaagagaccctcaaagtcagtgacccaaccttagtcgtgtttgtagaccgcatcaatccgcaaaagaaccagcgctaaatcattattgtgtgctattaatagaatataggtcataagaggaaacatgattaattgcaagatgatctcagtggctgttgagggcctagattttcccaaggcaaagtcctttcctcacttatcagcttttctttgttgggatgtaggctagaggcagctgaatgaacagatatttccctaagtcattatttcaaagactggacagggatgggtataatgggaatcttctctaaatgaaggatgattgaaccactttattagtagttgagtaatccctgatgccacagtgatgctctggcggtctagaaaggagagcgaagcttacagcaaaggctgcagtgggtttggttcttccagaccagccacttacacagcggcacagaagagaaaggcctggctgtcccccatcaccactcagtcaagagagagtgcctgtggccaggccctcttagaggctgggtagacactgcccagggtgtttattctgctccaagacagaaacagaagagaacctcctgccgtcttgggacacagagaaaagagctggtaggcctgggcccagcaggctaataatctgcccacttggaagcagatgccagcaacagttgcaatctctggccggttagattggccagcccttcttccttggggagggggaggggggtggacgaggtaaaggggagtgaagaggtatgagcggatgatcctttccatgtgaattgaggtggaaatacgagggtggggtagaaaatcctggcccagaagtacaggtccaggaacaagaaagggcaggtgctccagccagccttgaggtcaggggagaagtgacctggccagcccagcagaaacagctcacctggagccatggtgataatgcctgcttcatagggtttcatgagggttgaaatcaaggtcattaacatgtaagtgttctgaaatgtcatatgaaagactggttttcagtatgttgattatggtcttgtggaacttttgacagacacttccttgtaggcctgttttataaagcaggaaaaaatggagctgccggaggtgagatgagggtgtggggcctggagcctcgcttgcagccttcctttaccctctgcagtctcctcggaggactgtactcaggggagttcaaggtgaaacctcctgggggtctcggggagcccggcactgccccccagctggccctgggccccagataagtcatttatgcattttggaccccagtttgcttttccaccaagtggacagacaagtcagactagatcaaagcattcttcacttagttcctacggacaggggcttcagaattctttgacatctttgagacaggcagtattttgtgctttttttcctggagggacatgacatagttttgtttcgtcagcttcttagaagggtcatgttcgcccaaacatgaaggagtgctgtattgattcctcaggtcccttcctgtgctgttagtttgttgtaagcgacagaacctccccaactcaaattgacttaaactgcaaagggaagttaatggttcagggacctgaaaaatcccagagctggcccagctggagtcagtactcaggtattctcatcaggaatttacccctctttatttccagactctgcctttctcaggtttaacttaattctcggccccttcctcctgccccacctctgctcaccctcaggtggcaaagaagtcctcagcagtccccctgccttaccacccatctgtttccgtcagaaattgcagcaaaatgtccagggcccactctgattggccgtgcttggctcacgtgtctctcccagagccaatccctatggctgaggggaggagacattcaggccaggacgcctttcccccttacattatctcatgggattctgttcttgctgtaaacctgcaggaagtgaagtgctcggcctgtatgtcacctgtgtgatgaatgggtcatggccatgagtgtgctgggattgtggaggcaaactgaaggtcatcgtcccttcccaggtggtagaaagtggggccctgggataagcagggtactggctggattcccggatctgtagccctcctttgctgccgtttccacggccctttggcatcttcctctctcctgcatgagggactgcagggcgacgggcatccgcagctccctctagtcggcaggaagtaggttcctggctgagagagacttggcaccacggcacatcgctgctgatcagcctttatagagccatatgcatcactttagagaaagaaaggagaaaaattagagtggcgggaaagcaatttccgttgcaatttaaaaggcggctattaaaattttataagagctttattgcaggggttttctgatcatcccaggaatttttaaaatgggaagtctagtgataaaggaaaatgttctgggtgcgtctggttccctcctgccctgccaagcatcttgaaaaccaccattgtgagggcttcctagaccagcttagcaatagcaacggcccaagaggccatttctgagtgttttaaaagcgtgtttttctgtatttgctgtttctatgtatagtgactgtttctaattttattttgtactttgctaaatggcctggtagggagctatgggaatcgtcaagaacagcagttgcctctgcccttctgtgttagttgagagtcatttggttgtatgaacaaatagaaattcaggtcaaaaggaagtctaaaaggaagtggatggacacagggcctgggagattcggcttggaatggtttcaggcaaggctggatccagggcctggtgaggttgtcaggacatgtttccttttacctcctggctcagcattcttctgtgctgattttattctcaggtaggctctgaagcagcccctagcagctccactagtagattcaaccaacttagcagctccaagggaaataaaccatctctttcccccatagtcccagtatatatcatggggctggtgtttactggctctgatcatcctggctttggtggcagggtcaccccgggccatctctgaagctgggaacagggaaggtggtgcagtggctttttggccagacttggatcatatgaccagtcccacctccacccacaacccatgggtggggtgagtcccataggactgagtgggaaagatgaggttcaaggggctgactgaggaagagaaatagatgcagggtgggtcaaagcaaccgacgcctggaaccccttcccatactaacttcacgaagctgaatctgcccccacactccccagttgttcttttcccttggaagctgctccgcctttaccttctttcgggtctcgttgaggggttcttaatctcgggtccatggacctttgaaggatggaagattagtgggtcacgaggttggctgggaaaaacattacatctctattttcgctaccctgtaactgaaattaacatttttttatgcacagggcaataaaccacaattggattagcaatatctgtgactttgtcactactagaaatcacggatattctcatatcacattacagtgttgcaaatatcacaaaatatcatttaaacacctacctgtttctaaatcactataggtattggactcaccactagatcttgtaatataacagcattaataggccagaagtggtgtttcacacctgtaatcccagcactttgggaggccaaggtgggcggatcgcttgaggccaggagtttgagaccagcccagacaacgtgacgaaaccccatctctactaaaaatacaaaaattacctggggtggtggtgtgtacctgtaaacccagctactcgggaggctgaggcagaattgcttgagtctgggaggcagaggttgcagtgagccaagatggcgccactgtactccagcctgggcagtagatcaagactccatctcaaaaaaaaagaaattattctgaggagtctgcaactaattcaccaggttgccagtaggagtccctggcatgagaaaggttaagaacccccttgggcttctccaggaaccccaggggaatgatcattgaagttgtcctgattcctggaccctggggtgttagctagctgcttgctaggcttccttcctgggagattcctggaggagctgaccggcctttgaggttggcggggatatttgggtagcatttggacattatggtattggggaagtggagcagggaggtgttgccagcccactgccttcattgaccattgtgacagagtgtggtctagccaggtggtcagaaacagactctgggaccaggttgctgggttcacatcctggctgtatatagtacactttttttttttttttaaacagggtcttgctatgttgcccaggctggtcttgaacttctgagctcaaatgatcctcccatcttagcctcctgagtagctgggactataggcttagtgggactatagaccactgtgcctagcttagtatacttttgactgactgggcaacctcagctagtgggtcccttatgaattctgtgcctcagtttcctcatctgtaacatgaaagtaataatagtatcttcttcttgggtgatcgggagagtgaaatgagtcagcacttgtctgctaggacagagccggcacattgggagggattgttattagtgaatggccattgcatataggacagctctagaccctctcagctctcatctcctgacttagtgcccagcctctgccggtgcccagaatgtgatgctgaacaatacagacagtgccttctccgcctggagacattcattcatccatggaatattcacttaaatataaacaagcatactaaatattcaaaggcataaattaataatataaagttccaaaccaggacaagtatgatttctctgtcattcctctgctcacagttgtctgaggaaatgtccttagaatagcccttcatctgtcccccctgccaccgcttgcccctcactcaccccgtgccagctccatgggcctcctgactgctcctgagatgctccacatctgctcctgccctctggaaggctctttcccaggtagtcacatgatctgtggtctcatgtattcacatctctgtcccctcgtccgggaggccttccccgagctctccgtttaaggtcacagtcccatcactatggcgtcaccccgctaggtttcatcaaggttccactctgtgactttgtattgtgtatttgtttattgtcctcctcccctactagaatgtctgctctctgaggacagctactttgtcttggagaaccctggttgtattcccggagcctggcacatagcaggtgttcagtaaatacttttttttttttttttttgagacagagtcttgctccatcacccaggctggagtgcagtggcacaatcttggctcattgcaacctccacctcccgggttcaagtgattctcctgcctcagcctcccaagtacctggcatgacaggcgcccaccaccacgcccggctaattttttgtatttttagtagagatggggttttgccatgttggccaggctggtcttgaactcctggcctcaagtgatccgcctgccttggcctcccatagtgctgggattacactcagccatgttcagtaaatacttgttgaaagagtgaatatgtgactgacagctgggtattactgcaggaaggcttaagttggccagagacctaacctcttctttttcctccatgtagatgcacagtctctgacatcagctctcctgggaccctccaagagcactagtgtctagaaggcactaagggtgagtaaggcgtggctgctggtttgcttagaattttacaactcatacacatattattttttttaaaattttaaaaaaagagtatcaagggaaaaatgaaagtttgcatcgctgtacttctgtcacccgcaagcctaacgtctaccccagaggtaattactgtcagtcactggctgggtgccctgccagaccttttcccatacacaaacattcctacatgcacatatacacacttattttggttcgttgtgtgagaaaaaggaaccaggctatgcagtgcttcttggcttgcttccaccatccccaataatagtatgttttgaagatctttgctcatgagcatacctcagcatatcatacatttcatatacttttattttttctttactttttaattcaatttttaaactttacatagagtaaaaccctcttttggtatatagttctttgttttgttttgagatggagtttcacttttgttgcccaggctggagtgcagtggcgtgatcttggctcaccgcaacctccgcctcccgggttcaagcgattctcctgcttcagcctccggagtagctgggattactaggcatgcgccaccatgactggctaattttgtatttttagtagaggtggggtttctccatgttggtcaggctggtttcgaactcccgacctcaggtgaactgcccacctcggcctcttttttttttttttttgagatggagtctcactctgtcacccaggctggagtgcagtggcgccatctcagctcactgcaacctccacctcccaggttcaagtgattctccggcctcagcctcccgaatagctgggattacaggcccctgacatcatgcccggctgatttttgtatttttgtagagatgaggtttcaccatgctggccaggctggtcttgaactcctgacctcaggtgatccatccgcctcagcctcccaaaatgctgggattacaggcatgaaccaccgcacctggccggtatacagttctttgaatggagacagatgtagacagttgtgaaactgccaccacgatcaagattcagagcagccccaccgccccactatgtgaatgtactggtttctctgttggttaaaaatatgagccaggtgtggtggctcacacctgtgatcccagcactttgagaggctgaggctcgaggatcgattgagcccaggtgctggagaccagcctgggcaacaaagtgagaccctgtctctacaaaaaatacaaaaattagctgggcgtggtgatgcacacttgtagttccagctacactggggctaaagtggagggtcacctgaaccggtggaggtcaaggctgctgtgagaccctgtctcaaaaaaacctaaaaatttaaataaataaataaatacatacatacatacacatgtatggcatgggtaatgggtatttacacatattttatatatatatatgtggcaaatatatatatatatatatatatatatatggcaaatacttacctgtgctatataggttttgaatatgttatgtttaggtttctgggttgggtttgggttggtttgctagtgaacattctctcttgtttctgtgggtgggttctaagcagtggcatgggcccccagctgcatgtcatttcagtttgcagtgacgccttcctggacgattcccagctttgttgggaggggccattgtctgatccttgaagaaccaagagaccataacggtgtgggaggtggaagggggaggattgtggcattcagaccctggatgcaggtagccgtgtcggccaagctgcgggaactgagtggctgtggatggagtttctctctcctggatgtttagtgggtctcatcacattccctcatcctggcagtcttgcctgggtacctgaagcttgtgtgtgggacagttgctaggggccagatttctgtcaaaggatgcttcctggcacaattcttgattacttttattttgaagtgattttagagttataaaaaagttgtgaaaatggttacaaagttcacatgtctaccctacatccagcttcccccatgttaccatcttatacaaccttaacacagtgatcaaaacaggaaattcacacaacccagtacgattaactcaatgacagacattaatcacatttcaccagtttttctgcggatgtccttttttcttccaagagtctattcttgatcccacattgcatttggttttcttgtctccttaacctcctccgatctggaacaattcctccgtctttcctagcctttcatgacccagacactttggaagaggactgctctgctattttgttgggtgtttcaacttgggtttttctgatgttttctcatgacctgattgaggttattcattatttggaacagtgccacacaggcagcatgcccttctcagtgcgtcattgtgggggtctgtgacatcaatgcatcatatttccggtaatgttcacctagatcacttggttaagttgctgtgtgccagatttctccacagtaaagttacacttttccctttgtaattaatggctatcttggggcactccaggccaggagtttgaaaccagcttgtgcaatgaagtgagaccctagctctaaaaaaataaaatagaaacaaattagccaggtgtggtggtgcacacctgtagtcccagctactcaggaggttgaggcaggaggatcgcttgagcccaggatgcggagattgcagtgagctgagatcgtgccactgcactccagtgtgggtgacagagcaagagcctgtctctttaaaacaaaacaaaaatgctacctttggggagaaactttgaggctatgctaatatcccacatcccgcttttcctcaaacttccacccactaattttaccatccattggtggccgggtcttgtctacagcagttactgctgtgctgtttccctgatggcagtttttgtgtgcctctcattccatctacatttattaattggaactcttctgtaaggaagacctgtcccttcccccttatttctttatttagttactaatttatatcctatgggctcatagatacttgttttaatctagcacattcctttttcatgtgataaaagctcccaagttccaagtaaattcctagcattgcctctcacacagcaggaagaacggcacttttcctacgtggtaaccagggccttagggaacttggaaagaacatgaacaggtttcgtttgttcattcatttattttccttcactcagcaaatatgcatttgagcacctactatctgcttctaggcactagggattcaggaatgaaaaaacaaactccttaccttaagggaacggacatcctactggagaataaaacagtaaacagataaaaagtgaatatagggctgggcatggtggctcacacctgtaatcccaacacctttgggaggccaaggtgggcgggtcacttgcggtcaggagttcaagaccagcctggccaacatggtggccgtctctactaaaccccgtctctactaaaaatacaaaaaaattagccaaccgtggtggcacacacctgtaatcctagctacttgagaggctgaggtgggaggatcgcttgaacccagaggcagaggtggcagtgagctgaggttgcgccactgcactccagcctgggcaacagagcgagactcggtctcaaaaaaaaaaaagaagtgaatataggataagttggatgtatatagtgtacataggatgtatataggagtatatagtgatgaataaagcagggaaggggactggcctcacagggcaattttcggacaaggtggccaaggaaggcctctctgaggaggccctgaatagaggagggagtgaggcggtccccagcctaattcatccacagccatccgggagatcacagtcaaatcatctcccttctgaacacagtttctgtgaaaaggaaatgtgttccctctccaaggggcagccctgctcagctggagccagtcttatccctgagtattgccagatctgatgttccccgcaatagaaaaggaaagtgaaaaattttttgccagtccattgaacccaaattatgcaacgtcagataatgaatgactgtgactatgttttgttttcattgtgtttattttttaagtttgcttttctttgtagcaaaagatagcaatttttcatttttagtggtgatatggattctttttaaatatataaagcttgaacatcacttgagggctgggtgcagtggctcactctataatcccagctctttgggaggtcaaggcaggagaatcacttgaggccaagagtttaagaccagcctgggcagcagagtgagactccatctctacaaaaaatgttttaaatagccaggcttggtggcatgcacctgtagtcccaggaactcggacggctatggcaggaggatcacttgcgcccaggaggtcgaggccatgctactgtactccagccccgggcaatagagcgagagagatacgtatgtgtgtgtgtgtgtgtgtgtgtgtgcgtgtatgtaaataattgtacagatggggagtagatacagctgaaaaggaagggtggaacacagcgactgggcttggtaagcactgtatggctcagccacccactgtttttcctctgggtcaggggttctcagcagcgggcctgagctgaaattggcaaacaattaccatgggtgtgcgccttgagccatttgcatcatggtatgtgcattcggccaggaatgtcttcaagtttcaggaacagaaacccccgctcactgcagcttgattgaatgagggcttatttctcgctcacaacagcacacctggaggtgcttggctgccagtgttagtttggtggctgggcagtgtcagggcagagccgctttgattctcttgatctttcccctcatggacacatcgctcctgctgccatgtcgcatagcctcccctagctccaaggaaggtggcaaatgttatttaacttttcagcctttcctgaggaggaagccagagaaaaaatgaattgagagtatctgttggggtggccagccagcactgcctggtttcatggggaaggaaaagcagtaataatgaacattaatgggtgctgactctgtgccaagccctgccgtaagcgcctcacgtgcatgatctcattcagttcttgtaactaccctaagacgtcactgctgtgatatccccatggtaatgatgaggaaactgaggcacgagtggtgaagctgcctgccaggtagaggagctgggacagggaggcatgcagcctgggtccagggcccctgttcttagccactacactttgttgcctcataagaggtccgggggtgcggggggtggggtacaggggaccaggctgctcactgtctggcctgggtttaaattcttccagcaagggcagagcccagcagtgtgttttgctttggggaagttgtgatcattaaaaaactgtcttgtgaatcacatccgcccctgtgtaactaactacctcccactggttcaggtctagtcctcgggagagcaccagctgcacgtcttattcctggcagccctgcagggacttacaagtggctgagggaacccctcttggcctccctttttccaaactatacctgtgcttttagttattcttcccaggatgagccttctagccttttctttctctggaggtctgctggttgattgcgcacacatttgatatgcgcctcccctgcccgtccctgtagagtagtggggatgcagtggtgactggaccagcctcatggctgggtggctctgccctcatgcggctccccatccggtgagggaagcagaccttcagaccccagagtggtcaggtctgtgatcggggaagcccaggggagtgggaacccagtggaggtgcctaacccagcctaggggtcaaagagggctcctggaagcagcttttgggctttggaggtggaatagagattcatcaaggagccgtttctaccatcttctccacctgcctttcttcagtgaaactctcacgacagctctcctttctgaacttctgtttccctcctcagtaaaatgaaagattcagacttgggtctccatccatccttccaaccaaccatcattgattgggcacctcccatgttcctgctcctcttgctgggcacgaggcttaccctggtatacagtatgttgggaagttctgcaggtaaacaacccagagtgataagagttctaataggggaagccacggggctgtgggaaccccaagaaggcacctaacggtgacttggagtttggggacaggcttctccagggagatgaaagcaaaaatgggttgacacggtggccaagagcacagctttccggaatccagctgacctggggtctagtcatagctgagcccgtgactagccctaaatgggcagcttaactgtgggtgcttccattttctcccaaggtggttgtaaggattaagatgggattatgaatttcaagtacctaggacagtacctggcacgagaagtcgcataatagatgataatgagatgatgatgatgagatgatggtggtggcggtggtggaggtggtgatgatgataatgaggaggaggaggatggtggcagcttgcattcattagcccttactgcatgttggaggttaggtggcttagtaacagcctataagataataagcgtgagctgctgctgttgtgattattcattcaccagacatgtgaggggtcgccctgcacccagccctgagctggcacaggcctaggtgtagcaggactgtgttctgggagcagagttcatacagcgaaagcctgggccaggaatttcatgggccaagttgggagtttctttggtgtgtgttggagacccatggctcctggcctcctggtcccctttcttgttcattcctgagacttttcagcactggcctcaagagtgtaggctgcccttgacctctgtggccagaacgcatggatgctctgctcagcccatcagccaagccccaaattagacctgacagtgtgatttattctctgggatggagccgggagggcacagccccagtgggtgattcggagggaaggttgtcagcccgaattagcccagacctttcatgcagccttgctggttcagcttcctctggctaagagggttttccagggtgttgctggcttcagcactgcctccttccccgtccccagggacggacacttggctgtgatccctaaggagcgtgtgtcccgagggctgcccaggcaggccctgtctgaaggcagtggaggctttgggtcatttcatctgccccctcaggagcacagagtcgcagctccgtggagtgcttggcccattccccgcttctgttctttcactgagttccgtgctgggtggctggtggccgtttccctgctccacaccttccggtcggtgatcacagtgtctctgctttctagctgccttcattcattcacaggaatgcctctgatgggcgagtttctgctgcagtaacaaattaaccctgaaatcctagaggttggacacaacagatgtccatttcttacttgtgacatgggcaggtcaggtgggagggcttaaccttgtacctcagggacccaggctgacaggagctccccccactcgccccatcccggcctgcccctgtcttggagcctcacaggctgcagagacaccacagcagaaggggacggagaggtgcacagcagcacttagatgccgaggcccagaagccacgtgttcacttccacctgcacccagaactgtcacacggtcctgcctaactacaagggactagaaatacgatactcagtgagcagtaactctcatagccacagtggactggtggggtatttatgcagcacctactgtgtgccaggccttctcagggctctagaaatgcagaggtgtccccctgccttcctggagctcatagtttagtggtggaaacagaattgaagtaattacagcaacagctgtgtgattatgtctgcactaagtgctctggcagaggagcccagagggccgtgacagcatatctgagagcccggacatgtcttgagaggtcagggaacgtctgtcataaggactgacgtttgggaggaggcctgaaggataagtagaccttcccccagtgggggcgaggaatggggagagagtccctggtagagggaaccgcatcagcagagctccggacgtgggaaggagcttgactctgcgaaggaactggaagaagacctgtgtaactgcagggtcaagagctgggagaggtaggtgggggcagatggtgccgggtctggctggcggtgaggaggaggctgggacttggaacacctgccttttggagctgttgaaagaatcaaatgagctcagtcattctcttaacaaatgctgagttcccactctttggcagggggtgttccagcagtgaacaagacgacaaatatccctgttctcagagctggcattcgaggagcgggacacaggcagtgaaccaggcagatacataggataatttttacctggtgaaaaaaactgctgaccagtaaatagagtaaaacaataaggagcgtatggattggaggcttttggctccaggtaacggcaacccccattcatgcagacttaagcagtcaggccccccacctccaagtctgagggttctttggaccctgtgagctggtgacacagcagctcaacaatagcctgggggactgtctgtcacggtgccttcatcttaaagcaggcaccttccatggtcagaggatggcaggtagggatgccctgggcagtgtcagggcaggtagcgggagatttttcaaactctgcatgtcccaaggatctgccactagcgtgccttggtgacagtgaattatagaagccagtgtgagagtaaggaggaagctgttgctctagtctaggctggagatgccagaggatggggccagggtaaggagcatggagggagaggagggggcaggttctgggtacggtttggaggtagagtggacaggacttgctaatggcatggctgctggaaaggagttctgagcagacacacacagatgtccactgtgcactgtatcttcctcatgtaaaagtcatgtgcaggccagacgaggtggctcattcctgtaatcccagcactttgggaggcccaggtgagcagatcacctgtcaggagttcgagaccagcctggccagcatggtgaaaccccatctctactaaaaatacaaaaattagccaggcatggtggtgggcgcctgtaatcccagctgctcaggaggctgaggcagggagaattgcttgaactcaggaggcagaggttgcagtgagccaagatcacgtcactgcactgtagcctgggtgacagcgagactccgtctcaaaaaaaaaaaaaaaaaagtcatgtgcatgttacagtctgagaaatcctacaggaaagaaacccgcttctttgactatggagcacttttctttttgaaagacacccaggaacatcttctacagtgtaatttggaaaatgtttaataatgattcccatccttgctgtacattagaattatgttggcaactttaagaaatcccaaggcctgggtctcacccttgaccaattcagttagagttactgagcgacattataaagctgtattatttgtttgcatttctttaattttttaattttaatttttattttttggagacacagtctcactttgtcgcccaggctggagtgcagtggcacaatcttggctcaccacaacctccgcctccgaggttcaagcaattcttatacctcagcctcctgagtagctggaccacaggcgtgcaccaccacgcctggctaattttttgtattttagtagagacaagctttcaccatgttgcccagggtggtctcgaactcctgagctcagacaatccacctgccttggcctcccaaagtgctaggattacaggcatgagccaccttgcctagcctgcatttctgattatcaaagtaatgcttgtttgttgtttaaaaaaagaaatcaaaggacccataatgccccaagataatcacttttatgagctggtgtgtgtcttccagatttttttcaacacttgtacctaaaaaatgccatacgtgccccaaaacaaagtggttcgatagctttccaaagagatgaaaaaaagtttgccagcggggggtgggggtggtgggggtgggggtcgggcatggtggctcacgcctgtaatcccagcaatttgggaggctgaggcgggtgaatcacttgaggccagaagttcgagaccagcctggccagcatggtgaaaccccatctctactaaaaatacaaaaattagcctgacgtggtggcacgcgcatgtaatcccagctactcaggaggctgaggcaggagaattgcttgaaccggggaggcagaggttgcagtgagccaagattgcaccactctactccagcctgggcaacagagcaagactctgtctcaaaaaaaaaaaaaaaaaaaaaaagtttggaggcccacctgaaacattcagggatttgaacaacataatcagctgcctttctgtatttcctaattgattaattttgtgacatgtttggaatccagatatcaaaaatgttgaattcagcagggtacagtggctcacgcctgtaatcctgtccctttgggaagcataggaggatcgcctgaggccaggagtttgagaccagccagggcaacatagcaagaccgcatctctacaaagaaaaaaaatagccaagtgtggtggtgtgtgcctgtggtcgcagctacttgggaggctgaggtgggaggatcgcttgagcctaggaggtagaggctgcagtgagtcataattgtaacactgcactgcagcctgggtagcagagggagaccctgtctcaaggaaaaaagagaaaattggactcaaaatgttccgtatatcctctcacatgtcataaaacagtgttagtcacacttttcacagacatccttattacaagagtcactttttgagtcatctacacgtatttccagagtacgctgtctccacgtccatctgaagcatttgtgatgtggcaccccttgaatttgtgtatgttgtcactggaaactgtatcccaacactcaggaagccattcctctaccattagacagtttttttttttaatgccccttttaggaattggtgatctctacagccactcactgttaggtttttttaaaaaaccaactcagatgtttaaggacagttactgaacatgggtaagtggctgagtaaacgtgaacatataaaagtggttatataatcgcctgtttgtgagtcaatcagactcatcattccagtgcgaataataaatgacaacttaggaaaatttctccatgttctttcttcccccacagtggcactttgctttgagacagttttcagtgctatattacacatcctttttttaaaaaaaattcaaaattctagttgaaatgccccatttaagagtttcaactgaagtattttgtttaaattggttaaacgtgtcttaaaatcatttgtccctatcttgctttttttgagtcggagtctcgctcagtcgcccaggctggagtgcagtggctcaatctccgctcactgcaagctccgcctcctgggttcacgccattctcctgtctcagcctcccaagtagctgggactacaggcgcccaccaccacgcccagctaatttttttgaatttttttagtagagacggggtttcaccgtgttagccaggatggtctcgatctcctgacctcatgatctgcccacctctgcctcccaaagtgctaggattacaggcgtgagccaccgtgtccggcccctatcgtgctttttaaaggaacctttatttattttattattattactttttttttttttttgagttggagtctcactctgtcacccaggctagactgcagtagctcgattttgtctcattgcaacctccatctccaaagttcaagcaattctcctgcctcagcctcctcagtagctgggattacaggcacccgccaacacgctcagctaattttttttttttttttttttttggagatggagtctcactctgtcacctaggctggagtgctatgtcatgatctgagctcactgcaacctccgcctcccgggttcaagcgattctcctgcctcagcctccagagtagctgggattacaggcgcacgctaccatgcccagctaatttttgtatttttagtagagatgtggtttcaccatgtcggccaggctgatctcaaactcctgacctcgtgatccgcctgcctcagcctcccaaagtgctgggattacaggcgtgagccaccgcaccaggccccagctaatttttgtatttttgttttgttttgtttttagtagagacggggttttgctatgttgaccaggctaccaggctggtctcgaactcctaacctcaagtgatccacctgcctcagcctcccaagtagctgagactacagccacaagccatcacggccagctaagttttaaattttttatagagacaggtctcactatgttgcccaggctggtctcaaactctagtctcaagtgatcctcctgtctcagcctcccaaagtgctgggattacaggtgtaagccaccacacctggccctttgctaatttcttacttggttatttttttctaatattgagttgtaagagttctccataaattttgaatattaatcctttgtcagatatgtggtttgcaaatattgtttcccagtccataggttgactttttgttatgtcgattgtttcctttgctgtgcagaagctttttagttcgatgtagtcccgtttatttatttttgcttttgtagcctgagcttttggtgtgatgtctaaaaaatcattgccaaagccaatgttgaggagctttccgccatgttcttttctgggagttttatggtttcaaatcttacatttaggtcttttatcctctttgagtttatttttgtgtatggtataagatttcattctttgaaaggctcagtttcattcttatttcccacttatgtttggatttatttctgggctattttattctgtttttatgtcagcaccatactgttctgattactatagctttgtaatataattttaaatcaggaagtgtgatgcctccaactttttatttcgcagtgttgctttggctagttggggtttttttgtggctatatataaattttaagattgcttaaagagcatgtttacagtgacttatcacacttggaattgtgaatacttgggaatacttaacaagtctcctatagtatatgcctccctttttattattgcccaaactagcatcatttaagtttttaaaagctaatatgtctttcccaaagagcacttgttccaaaataaaataaagtgaaagaccctgaaatatagctacattttctaaggataatattttgggcatatcttgctttatctttggttacatcttttatccaaaataaatgaagttaaccactcacaaatagctagctcagtagtgtttgaccttcctgcgtgagctgtaactagttctctcacatccccagcttgacctcattcattcattcattcgacattgatatatttcctgtcagctaccctgaaagccagtagtaaagatggcctttggaatgtgttggaatctcagccatccccttctacctctatgaccatggccaaagcacttaccttcctgtgcctcagtttctccatctgtaaaacagaagagataatgctgcctacatcataatatggttgtgggcattcaaggatttaaaacagatccatgggccaggcacggtggctcacacctgtaatcccagcagtttggggggccgaggcgggcagatcacttgaggtcaggagttcgagaccagcctggccaacatggtgaaaccccatctctactaaaaatacaaaaattagccaggcatggtggtgcatacctgtaatcccagctactggggaggctgaggcaggagaatcgcttgaacctgggaggcggaggttgcagtgagctgagatcacaccactgcactccagcctgggcgacagagcgagacttcatctcaaaataaataaatagttagatggaaagaaagagaaagaaagaaatagagaaaaagcgagagaaagaaagaaaaaagcagatccacagtcccaggtggaatgtgatccaagctgatgtcttgttatcactgcagaaatatcgatgtgatagtctaccactgttcgctcagaaccttctagggttgcctttctaaaatctgaattattcagaattccgaaacacatcaggcccaagaggtttaggaagggatcatgccaccgtatatatgaagaaagcacttagcctagtacctggcacatagtaaatgctgtgtcaatgttaaccatttactgttgctactattactagttaaagtgcttacctcaccatccgtaatcatcatcatggaaaagcgagtgataatcacagtgagataccgtgacacacctgcttcagtggctacgataaaaagagggcacggaggagctgaggtcagagagttccacaggaggtctgctagggactggggccttttccttacatggatagggggagggttctgagcagaggaaggacatgatctgacccatagattaatagagtccctctggctgtgtgtggcagcaggagccagagccaggaaattggggcagaagctcctgctgtggtccatggtcctgcctgtgggggtgtgaaggaggggtgagcccatttatatcttgaaggtggagctgacagtgagtactgatggcctggatgtaggggtgagagaaagagagggggctaggatgaccctgaggtttgggcctggacaccagctgaggggtgaagatactgcattgagggaccccagggtcggggtttgcagggagtggcagaaggccttgtgaagaatcagagacgtggctgagtctgttcggtgctgggtgcccgtcagacagctgcgtgagatggcaaggagacagttggatacgcatacctgaagttgagagaggtccaggggggagaaggaaaagtaggggtccccagcacagaggtgttgaaatcacgaggagagccgtgtggatggggaagagcgaagctgtgcggagagacggcgaggaatcagcgaaggaggctggggagggagtgccagtgaggagggaggagacctggagagtatggacccctgcagtgaggcaggaggttgatgagggcccgaggtgattgctagatgggaggcacaaaaggctgaagggagcaggttcaagagagacggggctttgttgaggcctgtgaaggtgtgactacacgtgttgtttgttgctttctctctgttcaggccacacctggcacacaatagctgcacaataaaaatgtgttaaattaatgtcttcatggattggggagaggttagaacgcagaggagcccttggaattgggggtcgtcactgtggagtatggcagaagtgtgttctatggacctgggctcctgtccccagatgatgatggggaaggagaatcagaaacataacccagacatctgggcgccccccagaccatttacttagtgcctggtgccaccaacaggactgacgtggcatccccatctagagaatgagtctaataataatactgactcatggagctgttgtcaggaatcaatgagataatgctgtaaaacatcatcagtgtttgataggcttgagctgttgttacaagttaaatcctatcattaccattattctggcttcatggccctcaccacctagtgggggagatagatatcaaataatcaggctgggcgcagtggctcacacctgtaatcccagcacttcgggaagccaagatgggcagatcacttgaggtcaggagttcgagaccagcctggccaacatggtgaaaccccgtctctacaaaaaatacaaaaagtagccagtgtggtgatgcgtgcctgtaatcccagctactcgggaggctgaggcacaagaatcacttgaacccgggaggcggaaggttgcagtgagctgagatcatgccactgcactccagcctgggtgacagagtgagactctgtctcaaaaaaaaaaaaagataccaaataatcactcagccacgtaatttaactgtggcaatgaaactataaagaaaaggtacacagccactcgagaggctaaggtgggaggatcgcttgagcccggggggtcgaggctgcagtgagccatgatcacgccactgcactccagcctgggtgacagagcaagaccttgtctcaggaaaaaaagaaagaaaaagtgcagggggccttgagagagaataacaggcaggaaggaggtgggggtcttattccaggctggggtgggcgtgggagtgtcagaggaggcttttctgaagaagcaacctgtgaagctcgacggggaggatgaacaggaactagcctggggtgggctggaggctggggcattttggctgggagaatagtctgtgtgcaggtccaaggtgtcgcaggtggggaggaactgggtgtgttggaggagcagagtgcgggaaggaaaacttgggtcagctggtctggtgagccacggtaggagatttggactttcttcccacagcccctgggagccacagaagggttttcaggggagaagtgatacaacttcatttaattctttctaaacttctgtgtgcactttcaagccttgatgtcctgacactcttcctcccccaggacagtttgtaccgctccagggtcacgtcagagactccagagccgcctccaccactgtgattccttgaagctttttgccgtcatctggccactcagtcggcggggttgagaggagctttctatagacgagaaggtgccctggttctcgactcatcagcctctaggaaagaagcagcttgctggtccatcccaggctgctgggaggcccgagaaacaggtcacagcagccccgcctcctccatagacctccaggcctctcaaaagggacccccacctgctgcccgcaaagatggcctcatttcctctcaggcccagcgctgccagcagcctgtcccccctcctcatttccctatttcttttgagtggccagatgacagcacaaagcttcaaggtcgggggccgtggggtggtggtggagtctttgacctcatgccgatcaacgtgcttctctcggttccctgttctgggccctgccctggaaagaggcagggtggccggggaggggagtttccagattacctgtgtctcctgggcatggcacaggaaatgactccttcataggctgagagttttgggaggccctgtgccacaaccccccagcaagagcccacatgaatccgccatctcgcccgcagcctggggatgctgctggattttccgggtgtggaggggcccaggtcccccgagcagctcctctgaccccgcaacccggcatctcctgtgcccgagtggcgtctgtcagttgctcagtaagtggagggctttgctgtcccttctgctgtacccacagctgcccgctcagagcaaggtggctctgatcctgcaggagggggctctctttgagagcacttgggtgtatcgtgtctcagaaaacccacatggcttgtagctgtggctgcctaacagcaccacctgggtggttgagtggctcttccagagacccttaagtggatgggctccccagccaggcgtggtccccactgctaagtatgttataggtgttgacccacttagtcctcccaaaaaccctgtgaggcaggcactatccagttttacacatgaggaaactgaggcacggataagttgggttgtttgcgtgagccacacaggtaggaagtggcagaaccaggatttgaacccagaccatctggcttcataatcactctgctatacttcctgccagcctgttctcccccgccgacacacacgcacgcacacacgcacgcactcacacacactcctacacattcctctctctgtcatatcacctggtttattttcttcatggcacatatcacagtggatttgtgggcttgtgtattgcctgtctacaccctatagtatagcctgtgagctcctgtttgaccataggaattctgtgtcttgtgcattgccatatccccagcatctagaacaggacctggcccgaaagagctgctcagtaaatatttgttgaatgaatgaaccgacatggccagtgacacaatgtctcactgggtaggtttgtgttattttttcctccttcgacctcgatccctcctgccactcactttatagtagaggcagtcacaggcgatctgtgggtagagcgatgattgaacccgggccgggctgaccccagagcgcacgctcctttgcccgcccctgccacactggtatctttcccttgatgctgacggagggatgtgacaccgcagccagccaggtctcctcatggagggcctcggaccacgtgtcattttagagaccccagcggcagtccagatcctgaagtccgacctttgattcaggaacagagcagctgcaggagtgccaggctgggctttctggtcctgtctctcatcctcagctccagtcagctggggattaaccccctgccgtcatcaggagaaatacaacatgggaaaccggcggtaactccactgtggtaaaggatgtgagggaaacagtgacccactgcagagggtttcctgagctctcgtgcacagagaatcgtgcgtgtgcctctgggtgggcaggggacatgcagcctgggtgaacatttcccatacactaggatgaattggcccttcctgttcatgcctctaatgccccatttccctcctacagagattttctcttgtttaacaattaaaagatagcaggctgctttgtggttctcagtcaggatgctttttagttgcaagtaacaaccctggcaccatctggccaatggttaagacatgtgatgtgttctagaagcccaggggtggatgggcaccaggtggataggatcagcagctcaagcatgtctgtcagggactcaggttctcagcctccaaaggcctctgtatgcctcttggttccagaatggcttccagtgataatcagggccacttgcccttgtccacaggcatcaggagagagagaacacaccccactgatggttataagtggttcccctcagtctacagctggtccagctgaggtcacgtgcccctcaaccaggccggtcaagttactagaggaatgccacatcctgatcactcttgaccaactgggttctgttgtctagtagctgaaaaaagcagaagtggaaactgagtagacaaccattaatgcctgccaagctcagtccctgaccaagtcccctccctaagttagcaaatcgtgtcaggcccaacagattttgtggcatttgagaacaaagaagtgtggttttcttttgaagaagtttagtgacttgcgtccaatttctgcctcctgcatcatccaccctcagttaacacccaaaaaagggggcaggctgggcgcggtggctcacacctgtaatcccagcactttgggaggctgaggcgggcagatcatgaggtcaagagaccatcctggctaacacggtgaaaccccgtgtctactaaaaatacaaaaattagctgggtgtggtagtgcacacctgtagtcccagctatcgtgaggctgaggcaggagaatcgcttgaacccaggaggtggaggttgcagtgagctgagattgcgccactgcactccagcctgggcgacagggcgagaccccatctcaaaaaaaaagcggggggtggacagggggcaagtggagtctggctgccaaagactacttgtctgatggtggggaaaaaaaatgggtgtctcctcccttgtcactgggaaggtttttgtttctctttccatcttcatcctctataggtcctttcattccttcccccagtctgaaatatttccggtgtgtctgtagctgtgcacacatccttgcaaaatatatattgaggtttgagtaaagagtcagcttccggggtttggagctctgtatctcattctttcggtttcttctggttttcaccaaatagcatgtgttcgccatctagccacgttgctggatgtgtgtccagtgtatggcgtctggcagctgaacagttgtacatgctgtacatctgccacggctcacgtgtctggtcccctggtgttgggcatccaggttgcccctagctccaccccacttcaaaccatgcttcaagtgagcatccgcctacctttgccttaggaacccatggggcttacccccaggagtcagttgcagccggagataggcattctctctccccaggggtgggattaaggcacctgccacaacacccagctaatttttgtacttttggtagaactggggttttgctccattggccaggctgatcttgaactcctgagctctctatgaggctgctctgacccgcgttcccccgagagcacaggagggtcccgcttccccatacctctcgccactttgctgttgtcctgcttcccagtttcaccaatccgaagggtgtcaagtggggtctccggggttttaatgctctgatggtgagtctggctgagtgcctcttcatgcccctgttaacctaattcaggctcccctttccaagagaggcccagtcagcacaggcattggaaggcaaattctggagccggtgacctgcgtttgaatcctgaccctgccatgtaacccagcaagttagttcacctctctgagcctcagagctgccataaatataaaatggaaataatagtagtatctatattgtaaggtattttgaggattaaatgagataatatatgtaaagcatttaagacagtgctggctgggcatggtggctcacgcctgtaatcccaacactttgggaggccgaggcaggtggatcacttgacgtcgtgagttcgagaccagcctggccaacatgatgaaaccccgtctccactaaaaatgcaaaaattagcccgacgtggtggcgcatgcctgtaatcccagctactcaggaggctgaggcaggagaatcccttgaacccaggaggcaaaggttgaagtgagccaagatcacaccactgcactccagcctggccaacagagtgagactgtctcaacaataacaacaacaacaaaaaaacagcgcctaacacatatgtgatctgaaagcattagcaattattatcactatcaccgtcattattattgttttaaagtttctaaactttcaaatgttgtatcctttcactttcaatgcacgtcagaatggctctgcctgtggaggaatttctggcttctcctgggtcgtccaagagacaatatagtcaaagttgtccgaagagcaggcttggagctactcctttctttcacatttgagtcgagtgctgtatattcatttccacgtgtgtagtttttaatttttaaaagtatgatgtgtgcgctgggcatggtggctcatgcttgtaatctcagcactttgggaggctggggctgatggatcacttgaggccaggagttcaagaccagcctgggcaacatggcgaaaccccatctctacaaaaaatacaaaagttagcccggtgtggtggcacacacctgtaatcccagctactccagaggctgaggcgggagaatcacttgaacctgggaggcggaggttgcagtgagccaagatcatgccactgcactccagcgtgggtgacagagctagattctgtcttaaaaagaaaagaaaatatatgtaaagtgtttagagcagtgcctggcacatggtaaatgctatagtcatgtttgtggatatcactacatttaccagagttttctcctctgggtagcacataggttttaatgtgacgtgataaatactttttcttcacagctagcatttgtctctgatgactatctctagacatgttctcacgttagcatgttaaatgtaccctctttctttttaatgactgcctgtatcatatggacatatcaaaatgtatttactgattctttaatgagagactcttgggtttcatcttttcgtctttctcaagtagtgctgcagtggggagcctcgtccaagaagctctgggttcttgagccagtgtttttactggagccagaattgctgggtccagggatatgcatggttttgatgtaatgaactgacaagttgccctcaaagacggttctgccactagaacctggtgtatccccaccaacagaatacagacctgttggttttgatttgtttcttagtttggtttggtttttttgtttgtttgtttgagacagggtatctctgtggcccaggctggagtgcagtggctcgatcttagctcattgcagactcgaactcctgaactcaagtgatcctcccacctcagcctcctgagtagctgggaccacaggcacacaccaccacacctgctaactttttaatttttttgtagagacagggtcttgctatgttgcccaggctggtcttgaactcctggtctcaagtagtgttcccgtcttggcctcccaaaatgctgggatcgcaggcgtgagccaccacgccccacttgagttgttttagtaatggggaatttcaggcatttacaggggtagaaatagcatatattgcctgcatgtacacagttgtcaccagattctttggtgaccaacacatggccagtcttgtttcatccattcctctgcctttggatcattttgaaacaaatctcgaacattgtatcatttcatttggggagctttaaactgcatgcccacagcgtgcctgtacatcgtggaagagaggaggacatttctataaaatcatcctgtggtgcttttcattttccatggtgtgtcttctcccttgattctcagatgcccctaagacatagacaaggcaggtgtatctgttgggaaaacagaatccactctaggtattttagcggaaggaattcaatacagggaatttggttaaaaaagttggggaggagcagagaaaccaaaaaggggcagaggccagtccctagatgagcaaccagagctgaagggcgcaaggagtagggcaccttagcagagcccagggcagtgttgggcggaggcctcctccgcgtgagatgctgtccacattggagggaggaccacctggcttctcaccacctctaccttccaggcttctgccactgcccctgttggctgagcctcaccagcagtcctgggaaatgtagttccctgtgtttcagagcaggctaggaaaagggcaggcaatggatcaaagagggaactcgatccccatttgatagatgagaaagccagagggtctaatggcctgtcaggggcacctcatttagtgacaggcaccatccctggcactgaggtaagtcccttggttgccagggtaacctgaggcagctctttgggcattgcatgccaccagccagtcactgctgcctgggatgggcctacatggttccgagttcctcctctgccggaggagtcccctccaagcttccccctcccacactcagagtggacactgccttttgttcctgcccatcgcactgggctgtgccctgaccctaaggaaagccctcctgaggacaccgtgccggagagttctgggtgctggagtattctcagggagccccctgcatgaggtaccagcatcctgggccacactagaggccagaggaatgttgtgccactgagcagcccaagctggcattgagcgggcagctctgtactcagctggcatcaggcaagtgtgggtgggagctgtgctttgtgccctcctggagctggtggcttcacggaggtgaggggagcccaggggagatggaaggtgcccagatacacaaacagggaagctcaacaccaatgtgagagtttaaaggagacagagaagcccagttacacaagaaagcctcggtcagaagcgacgtgattgctaaggtgacctgggcccttcttgtaaagcagacctgtttcaagtactttacacttattcacttagttaattctcataataatcctgtgaggtaggtatggactgttaaccccagagagttaagtaccttggccaaggccacacatctagggagtggcacaccaggaatccatataatagtggtagtaatagccatggacacttcctggtggtcacctatgccaggctgccctcagagctctacatattaactcatttaatcttcacagtcaccctatgaaggaggtacttttttttttttggagatgggggtctcgctgtgtcacccaggctggagtgtagtggtgcaatcacagctcactgcagcttcacagtcctgggctcaagcgatcctcccacctcagcctcccaagtagctgggatcacaggcgtgtgccaacacgcccagctaatttttattattttttattttttggtagagacagggtctcactttcttgcccaggctggtctcgaactcctgggctcaggtgatcctctcgccgtggcctcccacagtgctgggattacaggcgtgagccgccgcgcccagccttcttgtttccattttgtgaggttggtgcaaaagtaattgtggtttttgccatcgaaagcaatggcaaaaaccgcaattacttttgcaccaaccaaatacaaatgaggcaactgaggcacaaagagatttaagggacctgtccaaggtcacacggcagagctgagttcaaacccaggcagcctgagttcagaatttgtgcccttaacggtggctcatgcctgtaatcccagcactttgggaggccgaggtgggcggatcacctgaggttgggagttcaagaccagcctgaccaacatggagaaaccccttctctactaaaaatacaaaactagccaggcgtagtggcacatgccacagggaggccactcccatgcacagcagttaggaattggttggaagtccttggaggtgattggcctgtgagttatgtctagtttgtgttgagaaagtgtcttcgaggacaggagtggtggctcatgcctgtaatcccagcactttgggaggccaaggcaggcggatcacttgacgtcagaagtttgagactagcctgaccaacatggtgaaaccctgcctccactaaaaatacaaaaattagcggatgtggtggtgggtgccagtaatcccagctactcagcaggcagaggcaggagaatcacttgaacctgatctcagcagtgagccgagatcgcgccaccgcactccagcatgggcgacagagcaactccatctcaaaaaaaaaggaaattgtctttgaatccaagtttaggggaaaaaaaaatcatctggagttggtacactctcttggtcacaaggagaggcctttggaagaggagctccacagcttcagtgatggtgataagagaaccttttgtttggcactaactggacagcatgccctcccacacagccgtgaagccactgttgtcgtccccactttccaggggcatcacacgaccttcctggcctgtggtcgctgctcaggccatggggatggctgcgcttctgccatgagtccttggtgatagcaggtgaacggtgaagagtccatgttcccgggagcccctgctgctggtggaggaatggacaagtaaacgactgaatagagaagcacgttggaaccaagacttctccaaagccagtgcttgtaactgattcggggtgctgctgtggcgtggttaggcatagaggctcacattctagccttgtcgcttcctaactctgtgactttggtctggtgacctcccctgctggccttccgtttccttagctgtaaaatgatctggtaagacctccatcagtcaagattgcaatcggctacatgtaacaaaaaaccagtaagccgtggcttcagtaaggcaacaggtggtctcttacacatgagaagaaaagggagggagggcagctgggggcggcgccactgttggggggtgcagggacagggagcaggctccttctgactcctcatcttgctgtccccagcatgtcactctcagcctcatgctcccaagatgacggttgcaccccctgatatgacatttatattccaagtacaagagaagggtagaagaggtgtgccccatttatttattaggaaaacaatagcttcgccaaaaggtcccatcccccatcccctgcaaacttcctcttccctcacactggccataatcagatacatccttagtttagctgcgtgggaatccaggaaagtaagctttttggattagtatcctgccaccccaacaaatgtggacctctctcaaggaatcagaagaggatgggtttggatttgacaaccagcagtggagcctgaggtgcctggccctggagtaacccagagcaggagtgcgggattctcccactgcgggcctgacttctggtttgtgatgtccaggaatgccactgctttgtgccctgtttcttcatctgcatgttgagagtgatgccccctgctgaggaacacttgggagaagctttaaaacctggctgggaaggactttgaaatacatcccaccccataggagagctgaggctggcttttgtttggaaaattgtcgggttttcttcaagtggagcccagccgaactagccgattgactgccagagcccaaacatactgccctgagacggctcatttattcacctctctccctcccgctcgagtctgaacagtgtgggggctgagagtgggagtgatggctgcggctctgcggccagcatctggcacagcgcccagcacccaccaggtacccggctgaggattgactgccttgcttctgagcacctcttgatctgaggagcagtcagatcttccccagtcggtcccttctctgcaccagcaccaccctccttctgggctaggccactcttgcccccacgtgggtggctaccctggcctcctgatgaagcctctgtaccctcggcaggtcacgatctccatgacagccagtcgggccactgcccccctaaacctgccatggaggtcaactccagattcctgaacactgtggcatccttgcacctgtttttcctccatccccctcacccactcacacccctttccatggccaacttctcatccttcagggcttaaacaccaccccttccatgccatcttccttggccacccactctccagcaccctgctcccatccttcgtcagtttaccccttccttctcttgctttagactgatttgtgtgcttaagtgcatttaattaatgtttgtttcctcctttagtcagtggacagagaagggggctatcgtggttactgctttgttacttatcacatagtaagatctcaggaaatactcacctagtgaatggaagtaaatcaaatgaatgaaaacttgtttggttttttttccccctgattttgaaacattcactgaaagtaatatgaaaaaatatggaaaggggccaggcgtggtggcccacacctgtaattccaacactttgggaggcgggtggatcacttgaggtcaggagttggagaccgcccggagcaacatagccagacctcctctctacaaaaaatttaaaaaattagtcaggcatggtggtacacacctgtattctcagctactgacagaatgagaccctgtcgttaaaaaatatatatggggaccgggcgcggtggctcaacgcctgtaatcccagcactctgggaagccgaggtggtggatcacttgaggtcaggggttcgagaccagtctggccaacatggcgaaaccccgtctttactacaaatacaaaaattagtcaggcatggtagtgggcgcctgtaatcccagctactcaggaggctgaggcaagagaattgcttgaacccaggaagcggacgttgcagtgagctgaaatcccaccactgcattccagcctagagtgcactccagcaagactccatctcaaatatatatatatatgtatatatatgtgtatatatgtgtatacatatatacacacacacacacacgtatatatatacgtatatatatgtatatatatgggaaggtataaagaacagattttcgaaaaccactagtagccccagcatcaaattatcgagtctttcctgtctttttttctgggaatgcatctgcatagcctatagatgtttactgtcctaggggttgataatttctttaatggtactcctggtgttgctcattgaggttgggttttttgcctgttataaaggatactatgaatttttctgcatctcttattatttatttaggattaatttacagaagtagcattcctggttcagagggtgagaacttttttttttttcttttgagacagagtctcgctctgtcgcccaggctggagtgcagtggcgcaatcttggctcactgcaagctccgcctcccaggttcatgccactctcctgcctcagcctcccgagtagctgggactacaggcacccaccaccacacctggctaatttttttttattttttattttttattttttagtagagacagggtttcaccatgttagccaggatggtctcgatttcctgacctcgtgatccacccacctcggcctcccaaagtgccgggattacaggcctgagccaccatgcccggcctgagaacactttttaaagctcttgccaaattgcccctagaaagggatcaccactgggaacattaaaaaagaaagaagtctgttgtcctggggagtggccagtttcctggtgtgctgggctcatcgggctcctggagagccattttcctggtctcctgagggcctggtgtccccttccagcctgctgtgctctgcctggcctgggttgcagtcccggagcaggatgtttgattatggtgttgagcaaacagaacagcaggccctcgccatctgccagctggtccctcgggcttgagaagagcttcacatccagcgagggtcataactagagcctttctagagccttctgtggtgctgctgaagggtggggctggagtgctcattcctaacagtagcctggccccacaacccccattcccacacacctctccccactgggaaggaagacaggtgcccccctgcatgtctcaggtgggtagaggcgcctcccctctgtccccagctgtcacatatggagagttgtcctgaaactgcctctgtgagggtgccccgctctccctgactccctctgggctcggagggagtgcacattcccccaggcagcccgcaatgtttgtgttcatccaggcgaagtggccctgcaggttctgggagtggaaatctcttataggagagagaaagtgaatctcaagctatggcatgagagtgactggggtggcacagagggtgatcaaacagctgagttttttgttgttttgttttgttttttaagacagagtcttggccaggtgcggtggctcacgcctgtaatcccagcactttgggtggctgaggcaggtggatcacttgaggtcaggagttctagagcagcctggctggcatggtgaaaccctgtctctactaaaaatagaaaattagccaggcgtggtggtgcatgcctgtaatcccagcttactggggaggctgaggcaggagaatcacttgaaaccaggaagcagaggttacagtgagctgagatcccgccactgcactccagcctgggtaacaagagtgaaactctgtctcaaaaaaaaaaaaaaaaaaaagacaaagtcttgccctgtcacccaggttggagtgcagtggcaccatcatagctcaagtgatcctcccgcctcagcttcctgagtagctgagtctacaggtgcatgtcaccatactcagctcattttttttttttttggtagagatggggtctcactgttgcccaggctggtttcaaactcctgggctcaagctatgctcactgcctcagcctcccaaagggcttgtattacaggtgtgagccaccatgcccagcaaacagctgagatttttttttttttttttttttgagacggagtctcgctctgttgcccaggctgcactatctcggctcactgcagcctccacctcccaggttcaagtgattctcctgcctcaacctcctgagtagctgggactacaggtgcctgccaccacgcctagctaatttttgtatttttcatagagatggggtttcaccatgttagctgagattttaaaatacatttgtatacattttaaagttgcttatgtcatacaagagtaaaatctcactgtttaaaaataactcatgcaatacaaaagactttaaaattctgttattgtgaaatggaacatacatacagacaagcatgtaaaacgtgaatacacagtttaccgaagaattccaaagcaagcactcaggtaacccgggtccagaaagagaacctgctggcagcctggaacccccatgggctctggccaccagaaccctttttttttccttttttttgagacagagtctcactctgtcacccaggctggagtgcagtagtgcaatctccggtcactgcagcctccgcctccaggttcaagcaattctcctgcctcacctcccaagtagctgggattacaggcacctgccacaacacttggctaatttttgtacttttagtagagacgaggttttgccatgttggccaggctggtctcgaacttctgagctcaggtaacccgcccacctcagcctctcagagtgctgggattacaggcatgagccaccgcacgtgaccagaaccctctttctaaaagcaactgctctctgcacttcacagtcaccatttcctggcattgtgaaagctgtgttccctagatgagcaactctaaataacgtggttccagtttacctagttttgaactttatataaaaacagttgtgaactgtatatgttgttctgtctggctttttcacttagtatcatgtccgagaggtgcattctagtttggagttaatgcatttctggtcctaaagcccattttccttgataaacagacaagctttatgagttctaatatttgtacattttgtttaatgagtattagaaaaaaaataaaacgaatccaacatggatattcttaagggtttaggcagtgagttggttgaaaggatcacgttcagtaaataatagtacaggtgggctgcggctatgcctgagcagaggtgcgtgactttggacagtttgggagccccagtggtgaggacagaatgaatgcacagatggcacacaccgtcgctcccctccctgagaaaccactgttacctctgggcctctgcctcccagatctttgctctgcaatgagcttggtaggtagataaaagtataaaatatgtagcttgaaagatttttaagtgctaactttttttttgagacagagtttcgctcttgttgcccaggctggagtgcaatggcctgattttggctcaccacagcctctgcctcccgggttcaagtgattctcctgcctcagcctcccgagtagctgggattacaggggtgtgccaccacacccagctaatttttgtatttttagtagagacgggatttcatcatgttggccaggctggtctgaaactcctgacctcaggtgatctgcccgcctcagcctcccagagtgctgggattacaggcgtgagccacctcacccagccttaagtactaacttcttaaatgtgggagtatgcttttcttccgaattagtacttcttggggtttctaggtttgttctctgattaaagtaaccaaatcccttgtaatattgcacttcagggtggggtaagaatgggccaggcagaccctgcctggaatacagggaactcaggggccaggacaatgcggcacatgccagtgactcttttatttagcacatggtttggtatctgcctcctgattttttttttctttttagagatggggtctcgctatgttgcctaggctggtcttgaattcctggcctcaagtcatccgcctgcctcgacctcccagcgtgctgggattacaggtgtgagccaccgtgcccagcctttctttttctttcttttgttttctataataatcttggccaattccttagcttccctccctccctgcagatgttgagaacttggaatctgggaggaggtgaccagaggggccaggcagaagctgcctgggacacatccttagtggtgagttgacgtggggttgtgactcagaagccagaaatgtgcagggccctggccatctgtgtgcacacgtgtgcaagagatatagagaaaaacagaatgagagacagacaaggacagggccgtggagagacaggtacagggatgcagaggggtagggggacaggagtacagagagatggagcagggacaagaaacatgggacagagatggggcggagatgaagagagatgggaacaggcccctgagacatgagacctgttggctggttaactagctggttggctgtttgggtaatggattagttaactggtcggttggttatctagttggctggctaattggttatctggttggtttgggatttttgagttttgtttttttttttcatggattcagaaaatactagtggaagattcaccctgttgatggccctgttttggatgctggagatagaccagtgaatggtggcttgctggcatttgggtgttggattgctgctccccacccctcaccccgatgagtgcactgtgagtgcaggtgctgttgaaaggatgtatcgcgtgcttgccatgtgccccttagtatgggagtgccctatggggatcatcttgctggatctaccagcagtctcacgaggtggcacttaccccctctggtacatattagggccagaatttgatcctaggcaatctggctccaaagcataagcctaatttctgccttaagtcacccaggagtggagtgcaggcatttattaagtgccccggtgttcatggctctatccccaatctttagagatgacagtggttttaatggccatagatttgacctgcctgggttcaagtccctcttctgctttccctcactgggtgctcttcaacaggaacatgctgctctgagcctccctgttcccttctgtaaagtggggagaacagtagggccttcctcctcaggatgctgtgtgggctcagtggagccaggtttgaggccagtcctgagtgggggctgccattgctatgtgcagcttagggagcttgaccacagggcaggatgcccacttgggctcatggttctgtaaatgccagtttttgctctcattttattattattattatttttttttttgagaaagagtctcactctgttgcccaggctgtagtgcagtggcactacagtgatctcagcgcactgtaactgctgcctcacgggctcaagcggttctcctgcctcagcctcctgagtagttaggattacaggcgtgcatcaccacacccggctaatttttgtatttttagtagagacagagtttcaccatgttggtcaggctggtcttgaactcctgacctcaggtgatccgcctgccgtggcctcccaaagtgctgggattacggcctgctctcatttttgacaacagatgttctcaaatggggtggccccatgagttgtcacgagggcagactcgagtcagccaatcccaggttcagattccggctcctcctccccttctctttgtggccctctctgaaccccattgtgaagcacgggtgacagtagcaggtgattagaagcttcagtgcaatggtttgtgttatggtgtcatgtgctctgcacagggcctggctccccgacagccctgggtcaggggccagttaggatgatggatgattactgccagcagctgggtttcccctccacccccctccccactccaacctggataacaaggcccagctgtgtgtgtccagcacctgcaccgcccccgccggcccccagctcccatccctgccagccttcccacggcagggagccttcctggctgtggtgttccgggtgggccccactgccgccccccatcccctcagcctagagccatcctcaggttaggataagcagagccggagccaccctcagcccggcccccagcggcaggatggaaagagtgggactttaacagatgttcttttacaaggattccctggctctatttaatcaagattgtcgaatattgatttaatctccaggcccaacagatgcggtcttagcaggtttcagtggcaattagctgggatcagtttgcaggtcaggctccgtgctggcaagacactgtcttctaaaggaggcttggcctggccacaggagtgagccctggaggagggcgcgtactaagtatttaaccatcagtctagcccgggcagtggcccacgggagcaggcccgcaggctgggtcatagcagcccctgtggggccccagtgttccccccatgatgatagtggggacactcagcccgtttagggcagcagctgttcactgagaaaaaaataataataataacactaaaagaagcagcacagccacgccagggcctgcggcttgatcatgagcctggctggagccggggagatccctgcagggcagcctggagccctgatgatgcccccagttaagtacccagaaggggccacaccaacaacagaggcctctcacctgcgctttcaggcccctcgcctgactgcatcccatcatccccactctacaaacatggctgtagctgctgggtgggcctggcatttgtgcccatactccaagaagcatcccattccacttctgcatttcaaaggctcattagagcgaataggactgtgcccagaactggaacaagctgcttcatccacatgtgcttcaggggaggtcacgacagcttcccttaacccagccaaccccacagagactcagaggggcgccccacccggccctggcactggggctgccagaaaggagcctttgctcaaggtgagccaccctgggctgtctggcccctgagcccagaggaacaagggttccttgccaggtcacatttggtttgcttgagattttttaaaaagtattattatataagaaaaaatgaaggccgggcacagtggctcacgcctgtaatcccaacactttgggaggccgaggcgggcagatcacctgaggtcaggagtttgagaccagcctggccaacatggcaaaaccccatatctactaaaaatacaaaaattagccgggcgtggtggtgtgggtgcctgtaatcccagctgcttgggaggctgaggcaggagaattgcttgaacctgggaggcagaggttgcagtgagccaagatcgcgccactgcactccagcctgggcaacggagccagactctgtctcaaaaaaagaagaagaaaaaatgataatagccaattctcgtttatcactgcaggccagggatattctaagccatggcatttattaacccacatctttcctaagagttaagctgtattattatctccattttacagatgggaaaactgaggcatagagagactaggttgcctgcccaaggtctagctagttaagtgatggagctgggaattgaaccaagatagactttgcttctatccactctgctgcagccaccacaccagggaagacctccagcatctggtgataagtgagagaggcagctgtgaaggtattcacccatttatttttttaaaaatttcatctctctacgcaggcgtgtaatcatatgaacatttaacctataaataaagttcagttataccaggtagcaaaattaaaattagacatttcagtttaagtatttggggtgattacagcctctatttccctggggaatatgtgaacacaaggtggggtgcactgtccttccctcattggctctgcgtgggagcctgtcgccaggccacggaggactctgcctttggaaacatgcaaattgttcagactccatgggccctcaagtagagagctctaactgtgcagcttggaagtctctccccattctgacttctagaaggtaagggccttgcaaggggtgactctcactctgctcatgttttccctcacatgctgactttttttttttttttttttttaagatggactttcgctgttattgcccaggctggagtacagtggtgcgatcttggctcactacaacctccacctcctgggttcaagcaattcctcctgtctcagcctcccgagtagctgggattacaggtgcctgccaccacacctagctaattttttttttgtatttttagtggagacaggatttcaccctgttggccaggctggtctcgaactcccgacctcaggtgatccacccgccttggcctcccaaagtgctgggattacaggcgtgatgcgttactgcactaaaagcacttcacaccatgcttggcgtgcagtgagcacacgctaagtataagctgtgttcattcccttggggctgcgtgggcatcttgcatgcattacacatagctctaccttgctatttatttatttatttatttatttatttttgaggcaacgtcttgctctgttgcccgggtttgatctcttatttatttatctatttatttatttatttatttatttatttatttttgaggcaacgtcttgctctgttgcccgggcttgatctcttatttatttatttatttatttatttatttatttatttatttttgaggcaacgtcttgctctgttgcctgggcttgatctcttgaggagatcctggctaactgcaggcttgaactcctgggctcaggtgatcctcccgcctcagcctcttgagtagctggtactataggcatgcaccaccacacctggcaaattttaaaaaaaaaatttttgtagagatagggtctcgttatgttatccaggctggtctcgaactaccaccctcaagggatcctcttgcctcagcctcccaaagggttgaaattgattacaggcctgagccactggcctggcctagctctttttgtacagatacattgtattccctggaatagaggcacccggattcacttaacccttcttgtgctggtgggcatttgggctgttctcagttcttctgtattacagcaatgtaaaacagtcaaagcatcgtgtacctttcttgacgtagactggtgttattatcagagagacagatttctggaagtggaattgctggattaaaataaatagaatgaagccaggcgcggtggctcacgcctgtaatcccagcactttgggaggccaagacgggtggatcacttgaggtcaggagttctagaccagcctggccaatgtggtgaaacccctgtctctactaaaaatacgataattagctgggcatggtgacacatgcctgtgatcccagctactcaggaggctgaggtaggagaattgcttgaccaaggaggcagaggtttcagtgagccgagatcacgccactgcactccagcctgggcgacagagcaagattccatctcaaaaaagtaaaaataaaaataataaaataaatagaatgcacacctaaaatgttgatgcataattccagctctctctcttgactttccctagttgggaaaaactgtactgatttaacacccttaaaagcagaatggatgtgatggctcacaactgtaatcccagcagtttgggaggccaagatgggaggatcacttaagcccgggagttcaagaccagcctgggcaacgtagcaagacccagtctctacaaaaaaaaattaaaaattagccaggtgtgctggcacacccctatagtcccagttacttgggaggctgaggcaggaggatcacttgagcccaggaggttgaggatgcagtgagccataatcacaccactgcactccagaccaggcgacagagtaatttaaaattttgatgcacagttctaacttattctttctattcccccaaggggagaaaactctactgatttaacacccttaaaagcagaacaggtcatgcaggaaccctgacctgtgtgggagccttgccaatttgaatgtaacagctggacgtggcctccctctctcctgtggggactgccctgggtccctgggtaggaatttgggctccttctggatgctggaggagatttgttttagaaacaccaatcctcagccgggcgtggtggctcaagtctgtaatcccagcactttgggaggccgaggcgggcagataacctgaggtcaggagttcaagaccagcctggccaacatggcaaaacccatctctactaaaaatacaaaaattagctgggcatggtggtgcgagcctgtaatcccagctactctggaggctgaggcagaagaatcgcttgaaccccggaggtggaggttgcagtgagccgagatcatgccactgcactccagcctggatgacagagtgagactcagtctgaaaaaaaaaaaaagaaagaaagaaacactagtcctctgggctctttgacgttaaatgtggaagtgctggctttcacagccgtggctgagactccactcgttgctcttccagccagtggagcagagtctctgccatggcactagctaatgagatttctaagattttcatccatcttatttcctgagggagctctgtagtggtcccatgtatgctcaaactcccagtaaggttggggaagacatagaggggaaaaatcagattttttttttttttttttttgagacagagtctcactcttttgcccaggctggagtgcagtggcgctatctcggctcactgcaagctccacctcctgggttcacgccattctcctgcctcagcctcccgcgtagctgggactacaggcgaccgccaccatgcccggctgattttttttcttcatattttttagtagagacggggtttcaccgtgttagccaggatggtctcgatctcctgacctcgtgatctgcccgcctcggcctcccaaagtgctgggattacaggcgtgagccaccacgcccggccgaaaaatcagattcttaacgtgcaatctgctgagctgttgctgacttgctggaattttgtccttatgaatggattttaaagacagtcagcgtcattcacgtattcccacagcacactcatttgaacgatttcatcttatttggagcacagggcaaaggggtggcaggcagactgttgaggtttgaatcccacctgcccctcgtaacctttgcctcatctgtaagatggtcatgatggaagtccctacttggcagggcatggtggtttgcacctgtaaccccagcattttgggaggccaaggcaggaggatcacttgaggccaggagtttgaggttttgtgagacctcatctctacaaaaaaaaatttttaagtaaaaaattagccggttgtggtggcacacagctgtagtcccagctactcaagaggctgaggtgggaagattgcttgtgcccaggaatttaagggctgcagtgagctatgattgtaccaccacactccagcctgggtggcaaagaccctgtctcaaaaaagagaagagaaatttatttaaaaaggaaaagaagcccctacttgatacagttgttagaacacaccagttaacacacgccagtgtgtagccctgaatctggcgcatcaggagagctcatcagtgttgaccttatgtttaataccgtcatcaccgtattatccctctccactgccccgcccacatgtgagaacaaatatgttagatcccagtccaccccagacatgcatctgttcacagtctggggaagacagaagatgctcagaggcttaaaaatccagtgggctaagtcccatatcaagggtgcatgtacatccccgggagctcagcagagggaggaaagggggaattctgcctggctttagtgggacagacagcatggggggacaatcggagggaggcgaggacaaggcgctctgaatcagtgaacccctgaaataactcctgcaaaggtcaccagtgcccttcatacctataactgccaccatacgtgactctttgagcagcgtccactcctgttgacagttggtcctccccaaccacacctgcgctccagcctccctgctgggcctgctgtatctcatgtcctggctcccatcacccacctgcccacttggatgtacagcctctccgagctcggaggcagaccctcttctctctgctctctctgttccttctgtcctcacctaagactgcacagtagaatcagctgccgagcttttaagaggcactcaggcctgcgccccaccccaaccagctaattcagaatctctgggagtggggtgtggacagatacctatatatttttttttattttttatttttgtgagacagagtcttgctctgtctcccaggctggagtgcagtggtgcgatctcggcttactgcaacctccacctcctgggttcaagcgattctcctgcctcagcctcccaagtagctgggaccacaggcacgcgccactatacctggttaattttttttttttttttgtatttttagtagagatggggttttaccatgttggccaggctggtcttgaactcctgacctcaagtgatctgcctgccttggcctcccaaagtgctgggattacaggcacgagctaccatgcctggcccagacacctatatttttataaagctcctctgtacctctattgtatgctggcaggaagaccagtcccccgagcatccccatctggccttggatactggctgttcccagcttccctgctcatccacggcaggtaccctctcttcttgcagatcctggtttagacaccacccttcaaggagtcttcctgaccccctcccaactatagtgatcttcagtcctatctatctatctatctatctatctatctatttttgagacagggtcttgctctgtcacccaggctggagtgcagtggcgtgatcacagctcactgcagccttgacctcctgggctcaagcgatcctcccacctcagcctcccatagtgctgtgattacacacatgagccactgcacccagccattttatgacctttacaatgctggccacccttggaaattctattttatttctctggcgtttctctactggaggtccattcatgagagcaggggcacagtctgtcctgctcagagattttctttagcacccacagcagtggcgtgtagtagaaatagattgagtaaatgaatggatttcgagtgtttggtgcttgtagaatgaatgaatgagttatacatgactgggaaatggtgaataaatgaatatgtttttagggctttgttggctggaagaacttttttgagggatttataagaacatggtaggtgtttgttgtgtgagtgaatggatgaatggatgcattttaaggactaactagttcttcctggataaacaaatgacttgtacgtgcccagaaactgctgagtcactggatgcatgcctggaggagtcctcattccacctgggccttagagaggaaccctcggacttgatgccacatccctgagccctccagagtgcttgagccccacttagcctccatggccgtgactagatcatgtttccctgaaagggagatgcttggagcacatcagggcagccctgaacacccagggggtccctctacctctaagcaaaggcctgtgaaaggacagcccatcccacccctacaagctatctccaagcattgctttcagcttcttgggcgtgctgcttcccagggaagggcacactcgggcaccaagcaggccctgcttgccttgggtcacagaccccaactgagccagtgctccctggtcctgagtgaggttgtcatccatccagtcatttaatagttatgttgttttatctatctatctatctatctatctatctatctatctatctatctatctatctatctatctatctgcctgcctaccctacctacctgcctacctatctatgtagtgacagagtctcactttattgcccaggcgggagtacagtggcgtgatctcggctcactgccacctccctctcccaggttcaagcaattctgttgcctcagcctcccaagtagctgggaccacaggcatgcaccaccatgcctcgctaattttttcatatttttagtggacacggggttttaccttgttggccaggctgatctcgaacctctgacctcagttgattcgcccacctcggcctcccaaagtgctgggattacaggcatgagccactgtgcccaatcagatatttatttagaaaagaatttttttagagacagggtctcactgtgcaaccaggctggagtgcgtggttcaaccctgtctccttcctttgtgatcagcagggtcccaggtaagggctgctttgtctgctgggagtgaagttggcatgagcagggctctcagccagcctgtgatggacaggaaatgtgagcaagaaccaagcctcagttgtgaaagcccctgagcatctggggtcatttgttactgcagcatagcttagctcatcccgcctgtcccaagaaggaacacattttgtggatggggagtgatcaagagttcaggttgggaatgttcagttgcagtgcatgtgagatgtgtaagtggtgatgtcaagtaatcaggtgggtaggggggtttggaactcagaagagcagtgggagctggagatgttttccgcattggcgacacacgtttaaatgagaatcacagaggtccaggcgctgcctgtgattgcaaggaaggctggtgcttgaactcaggactgtctgacttgaggtaagaaggggctggggttgagtccccactgtgtcaactcatagccatgtggctatgagttacttcctctgtctgctcctcactttcctcatctgtaaaatggaggtaataatgatacccacctcatggggttgttgaaagggttaacacatagcaattgacaggtgtgaagtgctctggaaaggacctggaccatagaaggattctattcatggtagttgctgtcgtagatactggcttttgtgtatgttttcattgttgttttgttttataactaaaatgtccagtggtgggaaatggaatagggctgactttgtgtccaacttgatgcagagactcaaatgatgactacagccccagattctaactcccagtccccttcacagatagttcttctcccatggttacgagacagctgcagcgactccatccctcacatcttctcagacttagggttaaagggaaaagcgcagccttcagctccagcactcctggtaaagacatcacggtctcactggttctgatcaggccacatgggttgctccagagctggggaaggagccccacctctagcccattgggtggccattggagaggggaggctcccaaagggaagtcgggactgttggaaaaaggagtcctggcgacagggaaagtaaaccacaactgtccacattggagggctcttgtgtttccctatgctgtgtcctgtgagcttctggcagacattgcagccctcacagagttgggccttttggagccaagacaccaaggctgtggggcttgcttgcttgtcgcaggggcaatctgggagcatttacacccacagatacatcactggttgcctgctcttctaacagaccctgatgcgtccccactggcccagaggcaatcaggatggctacagatgctggctctcccagcttcccttgcaaccggagtggccgtgtatccacattctagccagtgggacataaaagaaaggattgcagcaaggggaatgttctgggaaagattctccttcctgattagggtcagaccggtgccctcaccattcctatctttcccctttgcccatgattcagtgggaagtgtggctgtggccaccagcttgtgaccgtgacgcagcaagccagaagacttgctcaatcctgcagcacaggagggaggcagagggaatggggggacatgcttcacatcgctctccagctttcccaccaggcctggagccgccatatctggcctcctggtgacatgagatgactaaatgtcttcaccgtgcaaagcaccgttggatagtcttccgttactcgcagccaaacacatcccaactgactgtctcccactgccactcactcctcattttgctgctgtctcccaggctgccctagttttccccatatacagttccccagctgccctccttcacacagcaccgtgtgtcactcggggtcctctgatgccagcagcagaagccacgcttggcagtctgtggccgaatcacaattcactgaggatgtacagaatgaacacgaggccagaggagcaatcttagaaaacagggagggagccaaggaagccctggagggaagaaaccaggggtccccagcaaaagtcactgcacaggagaagccaggtccactgtgcctgcccctgcaaggacactttccagcctcacatgctcttagaaacctcgcacggagtcctaggagaggaccctgggccgaccaagcccacgtcctgtgcccactccaactgtgcttctgtggggggaaaggggaagcacttctgccaaagatacacaacagaactgtagtaagagcaggtggtattatacccattttacagattgaaactgagtcactatttccataacccgtccatgacacacgaggattgagcccaggaggcagtctggttcctgcctatgctgtgcttctctcatcacgggggttccccatcgggaaggtccaagtgcttttagggaggaggagctcggtagaagacagctggaaagagaccagtgtgcaccctctgagtcccagaggctgcgggtgccactcagcctctgaatgtcacaggaagactcgactgcagctgctaggagaagggatttgttcagagagacgaaggcctgcaagaacatctgtgtgtgtgcacagaagggagcagaatggattgagggtttctgactgagctggaaacaaatgccatcagcaaagcccatctgtcgggaggtgcttgcataagcaagtcagggtcgcatctgggccactggttttcccaacccagccttaagtgtggcctcaaaggactaatcctccctccgcactctgcactctgaaggcagagccacaacacaggctgggctgctgaggacaggcagcgccctcaggcgggccatcatcccagcttgacctgggatctggtgcccagcacagcggactgtggggcagggttcaggctctcaagcaaacagtcttgccattctgtaactgacagtttagagtggagacaataaacaccatagataaaataattgcacttttctctggcaaaccagcaacccctgctgaagtgtgacccacacatacttattttgtttaccctcattgtgtgtgtgtatgtggtgttttgttgttgttgttgtttgatttttgagatagagtcttgctctatcacttgggctggagtgcagtggcacaatcacagcccactgcagccttggcctcccaaatagctggaactacaggcatacgccaccacgcctggctaagttttaaaattttttgtagagatggggtttcactgtaatgcccaggctggtgtcaaactcctgggctcaaacagtcctccctcctcagcctcccaaagtacgggtattacaggcatgagccactgtgcccggcttcattgaggtttttattgttaatgttcttaggaagtgcattttacccttgaacaacatgggttggaactgcgtggatctatgtatacatgaatttttttcaataaatatattggaaaattttttagaaatttgcaactatttactgggcgtggtggctcacgcctataatcctagcactttgggaggccgaggtaggcagatcacctgaggttgggagttcgagaccagcctgcccaacacggagaaaacccgtctctacaaaagacacaaaattagctgggcgtggtggcacatgcctgtaatcccagctactcaggaggctgaggcaggagaatcgcttgaacccgggaggcggaggttgcagtgagctgagatggcgccactgcactccagcctgggtgacagagtgatgctccgtctcagaaaaaaaaagagatttgcaactatttgaaaagaacttgcaggggtgggtgcggtggttcacgcctgtaatcccagcactttgggaggccgaggctggcggatccctcgaggccaggagtttgagctaggcttgccaacatggtaaaaccctgtctctactaaaaatacaaaaattggccaggcatggtggtgtgcacctgtaatcccagctactcaggaggctgaggcaggagaatcacttgatcctgggaagcagagattgcagtgagccgagattgtgccactgtactccagcctgggtgacagagcaacactctgtctcaaagaaaaaaaaaacagaaaagaaaagatcttgcaggtgaaccacatagcctaaaaatattttttaaaaaataaaatgttaaggccgggcacggtggctcacgcctgtaaccccagcactttgggaagccgaggtaggcggatcacaaggtcaggagatcaagaccatcctaacatggtgaaaccccgtctctactgaaaatacaaaaaatattagctggccgtggtggcgggcgcgtgtagtctcagccactccagaggctgaggcaggagaatggcgtaacctgggaggcggagattgcagtgagctgagatcgcaccactgcactccagcctaggcgacagagcaaggctctgtctcaaaaaataataataataataaataagtaaatacataaataaataaaaataaaatgttaggtatgtcatgaatacataaaatatatgtacattagtctatttttctattttatcatttgctaccataaaatatacacaaatgcattctaaaaagttaaaatttatcaaaacttacacacacacaaacacactgccaagccaagagaaatgtaaacaaacataaacatgcagaattaaatcataactgcatgaaattaactgcagtacacactgcactaccgtcatagtttcgcgaccacctcctgttgctactgcggtgagctcaagtgttgtgagtatccatttgaaacaccgtgtgacactcatcatctccgcatgagcagtttgtctctccagcaaattgcacatcgcagtaaaaaatgatccctagaggttctcacctagttttcatcgtgtttagtgcaatactgtaagccctgaataacctcaggggacccgtacaaagtgccactagtgatgctggaagttgtcccaagaagcagagaaaagtcataacattacaagaaaatatgcaattgcttgatatgtgccatcgatggagatctgcagctgcagttgcccgccatttccagataaatgaatccagtgtgaggaccatcgtaaaaaatgaaaaggaaattcatgaagctgtcactgcctgtatgccagcaggcacaaaaaccttgcactgtttacaaaatatatttttatctcgtgttgcaaatgcagcttctatgtgggtacaggattgctataaggcatacctatagattgtaatttgcttcgagaaaaagtgaagtcattacatggcaacctaaagcaaaaggaagaaggaggatctcaagctggggaatttaatgccagcaaaggatggtttgataattttagaaagagtatggcttaaaaaatgtcaagatggcaggagaagcagcttctgccaaccagaggcagcagatgagttcccagatgccagtgagaaagtcattgaggaggctgggtacggtgcctcacacctgtaatcccagtacattgggaggctgaggtgggaagatcacttgagcccaggagtttgataccagcctgggcaacatactaagaccccacctctaccaaaaatttaaaaattagctgggcatggtgacgtgcatctgtagtcctagctactcagaaggctgaggcaggaagatcacttgagccctggagtttgaggctatagtgagctatgattgtaccactgcactccagccttgacaacagagaaagaccctgtctctaaaaaaaataataataaaaatgaataagaaaaagaagtaagcctgttcataagtgctaaggagaaaaatggagcagaggaagggcctgggagtggtggggatagacacacagaggcaagcactattagttttttgaaaattcttccgatcatctctgcatgatagtttgttgttgtttctgttgttttttcttttttctttttctttttctttttttttttttttttttttttttttgagatggagtctcactctgttgcctaggctggagtgcagtggagcaatctcggctcactgcatcctccacctcccaggttcaagcaatcctcctgcctcagcctcccacgtagctgggactacaggtgtgcgccaccgcacccagctaacgtttctatttttagtagagacggggtttcaccatgttagccaggctggtctcgaactcctgacctcaggcaatccacttacctcggcctcccaaagtgctggggttataggcatgagccactgcgcctggccaatatttttgcttttccaattgggaaatgttacatgcaactctagatttctgatttctgttggaaaatcagatgatctgacatccatactcccgcaagccttgattgtcagaagatgccctgccatccaggtcagtgcaggctcctcttggcctctctcctgtctcccttaggcaactcgaccctgagggctttccagcttcctctctcttctgtagcccatccctgtgctgcctcccggcaacatcttcaggatcgtttgtgttctcgtggggcaccaggaagaggggctcccccttgctccccactctccacctgccctcttctggtgctcactttttcagaggcttcaggctccccttgctatttgctccttgaatctgctttgagcttcccttgtgatctctgccagtgcgctccataactgggcataaattaggaaaagcccccctacacatgcgcatacatgcacacacacacacacacacacacacacacacaggcacacagacatgcacacacacacacaggcacacagacatgcacacacacacagacgcacacagacacgcacacacacagacacgcacacagacatacacagagacacgcacacacacacagacacacacacacagacacatacacgcagaagaggcctgctactttctcacacaggaagctccaatagccattgatcaagaacggctgcatccagctctagattcccagggaaagaaaagttagaggtcaccttgaaccaagtgcgtggcccaaagcagcactccactgccctgagcaaaatcagttccgttggcaggagggagcgggcacggctgctgggcagtcaacagcttccatcacagacggcgacccactttccccttcctctccagcaggattttcatcttctagaagttcaaggtggagacaaagggaagtgaccccgcagggtgttttatatgctggacagaagcacagactcccttccccaggggcctgcaaatcaggaggtacttacacctccaattaggcagaggccatctgttcactcatatgtataatactaaacgaacgtcctggacgttctagatggctcacgcctgtaatcccagcactttgggaggccaaggcaggcggatcatgaggtcaggagatcgagaccatcctggctaacacggtgaaaccctgtctctactaaaaatacaaaaaaattagccaggtatggtggcaggcacctgtagtcccagctactcaggaggctgaggcaggagaatggcgtgaacccaggaggcggagcttgcagtgagccgagatcgcgccactgtactccagcctgggcaacagagcgagactccgtctcaactgttctaggcactgggaatgcatcagtgaacaacacagacatccctgccattctggagccaacatttgagtggtggacctagccagtagacagaacgaacaactgctaagaaaaattggaagaaagtagagtgggtaattaagaaaggcttccagaagaccgggcttctctgtctctatagggtgatttgggaaggtttttgtgtttgtttttgtttttggggatttttttttttttttgagataggatctcgctttgttgcccaggctggagtgcagtggtgtgatcgtggctcatgcaatctcaacctcccgggttcgagtgatccttttacctcagccccctgagtagctgggactacaggcacatgccaccatgcctggctaatttttgtatttttagtagagatggggttttgccatgttggccaggctggtcttgagctgctgggctcaagtgatccacccgccttggcctcccaaagtgctgggactgcaggtgtgagccaccgtgcccagccggaagtccccatggaagaactgacatcatgggaaggaaccagccccaagaaggactgaggaaggatatcagatgtcctggataaggtttggtgcatcagaacagaaaagaaggccagtatgatcagagcttagtcagggatggggagagacatggaagccagatcctgcggggcttgtggagcaggggaaggagtttggatggtgttttaatgcagtaagtagtcactggggagatctcagtgaaaaagtgatgggctctgatttacccagtcatagtctgcagtaaccacatggatttctagagacattccttctgcagctttcctccccaaactccactggtgctcatgttgactcatctgtcattttcacttcctttctggcagagtagctgagctgagcaaacaacagagcaggtggacaatagtctggcctctgcatgaagccaccagttcacaggaaatacagggggcagaggaacatgttaagtggcacctcagggatcctgaaagtggggaaatccacaggacaggtgacccctttccttcaacaagtaaagagcatcaaaataaaggaaggtggccattgtagagtagaggagacttgagaaaatacctgcataagcagaggatgatttcgaacaaaccagctcacaaaagacacctgcgagacaatgatgggaaatgtaatgcaggcagggtagtgcatgacattaaagaattcttgttaatgtagatgagtatgataatgttactgtgatttttttttttaaatcttatgtactagagatacaagctaaaatatttatgggtgaaatgacctgatgtctggccaggtatggtggttcatgcctgtaatcccagcactttgggaggctgaggcgggcggggattgcctgaggccaggagtttgagaccagtttggccaatatgacaaaaccccgtctctactaaaaataagaaaaattagccgggcatggtagcacatgctggaattccagctacttgggaggctgaggcaggagaatcattcgaaccttcgaggtggatgttgcaatgagccaagcacatgccactgcactccagcctgggtgacagagcgagactctgtctcaaaaaaaaaaaaaaatgatgtctggggtttactctaaaacattctatcagaaacaaagaaggtcacaaggctgggtgaatagatgaaatgggaatggaaaatagttagtggttgttggagctgatgggtgactcagtctcctctctgcttttgagtatgtttgcaaatttccataataaaaagattttttaaatgagtaaggctgtcaagaaaagtcacatgtcccactttctgggagcagtaacacggccatcgcagctcatattttccttttcttccatttcagcatggcgaggacaacatccttgctgcctccagctggcgggcgaccacagctactgcctgctctgcgctactgagccactcggtctggagcccccaggacagcacctgcttcctgaggttgtcctggctcagctgtgcacagcgatggtggagaactggactccacaggctcacaaccttcctgtcaggtttcagggcccagcatccttcatcctgggcctggctgccctgaacaatggctgagggctgggggaccccatagagtgacaccacagcgtacggggccagcagcactccagtgcccgtggactatgaccacctatcgggccatccccagcgatggtgtggacctggcagccagctgtggcgccagggtgggcgatgtcctccctgggccacacacaggggactacgctcccttgggattctgggcccagaatggcagcatgtcccagcctcttggcgagagcccggccaccgccaccgccaccgccaccgccaccacccgccccagccccaccactcccgcaatgcccaagatgggcgtgcgcgcaagggtggccgactggccgcccaagcgggaggccctgagagagcacagcaacccaagcccctcccaggacacagatggcacaaaggccaccaagatggcccattccatgaggagcatacagaacggacagccccccaccagcaccccggcttcctcagggtccaaagccttccaccgactctccaggagaaggtccaaagacgtggagttccaggacgggtggccccggtcccccggcagggccttcctcccccttcggcaccgcagcagcagcgagatcaccctcagcgagtgtgacgcggaggacgcgggggagccgcggggggcccggcacacgggggcgctgcccctcttccgcgagtacgggagcacctcgtccatcgacgtgcagggcatgcccgagcagagcttcttcgacatcctgaacgagttccgcagcgagcagcccgacgcccgagggtgccaggccctcaccgagctcctccgggcagatcctggcccacacctcatggggggcggcggcggagccaagggggactcccacaacgggcagcccgccaaggacagcctcctgccactgcagcccacgaaggagaaggagaaggcccggaagaaacctgcgcggggcctcggcggcggggacacggtggactcgtccatctttcggaagctaaggagcagcaaacccgagggggaggctgggcgttccccgggggaggccgacgagggccggagccccccggaagccagcaggccgtgggtgtgtcagaagagcttcgcccacttcgacgtgcagagcatgctgttcgacctcaacgaggcggccgccaacagggtgtcggtgtcgcagcggcggaacaccaccacgggtgcttcggccgcttccgccgcctcggccatggcctccctcacggcctcgcgggcccacagcctcggaggcctggacccggccttcaccagcacagaggacctaaactgcaaggagaacttggagcaggacctcggcgatgacaacagcaacgacctgctgctcagctgcccgcacttccgcaatgagatcgggggcgagtgtgagcgcaacgtgagcttctcccgggcttccgtgggctccccgagcagcggcgagggccacctggcagagcccgccctgagcgcctaccgcaccaacgccagcatctcggtgttggaagttcccaaggagcagcagcggacgcagagtcggccccggcagtacagcatcgagcatgtggacctgggcgcccgctactaccaggattacttcgtgggcaaaggtgacggatggcgtgtgggtgggaaggttgggtgggccgaggcttgcctccgagacccccactactcattcattcactctgtgccaggccctgctctggcactgaggatgtggcgggaacagagacctcccttctggagggctgtgaggatccggtgagcagagccacccgggcctcagccctgtgtctgacacagcagcactccataaaccttgagctacaggacacagctctgcatttactcagcacatatggacttggggacagctcagtgccaggcactctctagagcctggggatgtagtatcaaccagcttaaaacaaatgttctgtcttcctagtacttataatgttttcatgggtaacacaaacatagaacaggataaatacgaaaaatacacaagggattgtaggctgctaaatgcagtggaaaagagtacagcagggaagaaggaaatggagtgtcggagggtgggggcagatcccagtgggggatggtcagagggggcctccgaggcaggtgcagtttgagtaccaagctgaagtcaccatgtgcaaattgcagacactgttcccagaacagagcagcgaatacaaaagtcttggaactgcccggcgcagtggctcacgcctgtaatcccagcactttgggaggctgaggcaggcggatcacttgaggtcaggagttcaagaccagcttggccaacatggtgaaaccgcatctctactaaaaatacaaaaaaattagccaggcatggtgacatgtggctgtaatcccagctacttgggaggctgaggtaggagaatcgcttgaacccaggaggcagatgttgcggtgggctgagatcatgccactgcactccagcctgggtgacagagtgagactctgtctcaaaaaaaaaaaaaaaaaaaaattgagaattgcttgtaactgctagtaacaggcttaaacaacatagaagggactctcctgtgaagaaatccagagttcagcagcccagggctggtatggtcagtcttaagcatcagtatggtcagccttagtgcatggcatgatcccccactgctccacaccaagatggctgctggagtgccaggcgtcacatctgtgtttccaggcagagaaaaagaggaaagggtaaggacaaaaaggcagacctcttgtcaagtcaacccccttatgcccttatgcctagtgtttcattattggaacgctaagcatgtgggagttatagcctactgctcaaggacattgccagggtctgaatttttacttgtggaaaaattcaaaaaattgcagcctccggcataaatgcgttaaagagctttctcagaagcccggtccaactacttgcacttagtggccacacctgtgtgcaaaagaggctgggaaacgcaggtttttagctagacaaagtttttcttttccaagaatagagggcttttcttaaaaaaaaaaaaaaaaaaaaaagacgaagtactagcagctagtaccccacagcagctaggtttttttttgttgtttttttctttttctttttttttttttttttttgaggcagtctcgctctgtcgcctcgcccaggctggagtacagtggcgcgatctcagctcactgcagcctctgcctcctgggttcacgcgattctcctgcctcagcctcctgagtagctgggattacaggcgctcgctatcatgcccagctaatttttgtagttttagtagagacagggtttctccatgttggccaggctggtctcgaactcctgacctcaggtgatccacccaccttggcctcccaaagagttgggattacaggcgtgagccaccatgcccagctcacagcaactagtttttaaaaatatttaaagtaatatccttgtcaaacataacaaatgtcagttaagtcatcccacaggacactggagctccaacttggagtcagacagccctcggtttggggtatctgttccatagctgatccacgtgatacgttttacccttcagactgtgtgacaaatgaagatgattatatcaatatcacatgcacaaacagaatgacacagagattgaaaagaaagggataaaaaagaagttccaggccgggcacggtggctcacgcttgtaatcccagcactttgggaggccaaggtgggtgatcacaaggtcaggagattgagaccatcctggctaacacggtgaaaccctgtctctactaaaaatacaaaaaattagccgggcatggtggtgggcgcctgtagtcccagctactcgggaggctgaggcaggagaatggcatgaacccgggaggcagagcttgcagtgagccgagatcgcgccactgcgctccagcctgggcaacagagtgagactccgtctcaaaaaaaaaaaaaaaaaaaagaagttccagacagttgcttacaaggaaaaagccaatgaggcaatgtcagtatcacatgaaatagatgtaaaggttgaaagcaccttttagaggaactaaggaggccatttcatgtttcttaaagttcgccaagaaattctggtagttgtgaaccttcgtatacctggcaacttggtttaggggtacctagatttaaaaaatggatcaggctggctgagcgcattggctcatgcctgtaatccccgcactttgggaggcccgaggcgggcagatcacgtggggtcaggagtttaagaccagcctggccagcatggtgagaccctgtctccactaaaaaatacaaaaattagctgggcgtggtggcgggtgcctgtaatcccagctacttgggaggctgaggccggagaatcgcttgaagctggaaggcagaggttgcagtgagccgagatcgcaccatcacaatccagcctgggcgacagagtgagactctgtcccctcaaccaaaacaaaacaaaaaaaaaacgctacggggagaagtagaaaaactcacaaccatagcgggagaagtgcacagattatctctctgaagttgacagaatctagtagctgaaaaataaggatttagaggatttagataacctaatgaaaacttgattttacactgtatatgtattaactttgtacctaaccaacaaagaacacattcttttcaacctacacgtacaaatacgtacatgaaaggaatgtggatcaaataaagatcaaataagattatacattaaaatacttagttctttgttaggcaggtaggaagtactcatcctggagctttaaaaaaaaaagccgttttctttttaaaaatttctttgtagccctgaaagctgttaaagaaaaaaacgttctggccaagcacaagggctccctgaaagtgtaattccaccactttcggaggccgaggtaggatgattacttgccccaggagttagagaccagcctgggcaacatagtgagacctcaaaaaaaggttaaaaatttagccaggtgtggtggtgcatgtctgtagtcccaactgttgtggaggctgagatgggaggatcgcttcagccctagaggcagaggttgcagtgagccatgattgcaccactgcactccagcctgagtgacacagcaataccctgtctcaaaaaacaaaaactcttcaataatatttgttaaagcacagtaaagaatgtattcagaaccatcacagcaggcatagggaccactgcagcggagtctggcagtagggaagagagattgggcttaactctgaatacagcgtagtcaagtaggaatttatagccaagaagcaaggtggggatcagtgcatggaagaaactattaagaagaaatgtcagaggtaaggaagattctggctaaaccaacctaatgttgctgatgacacgccaggatgatcagacatcacctttggatggtggaagatgaagagcttgatcaggtgttgaagatgtccagatattgaggataaggttggggggcagggttcttgctaaactgacttagcgcagggttctttgttaaaactggattttacaaggaggtgcacagatgggcctaggagaagattccaaagcctgactaaagtttggccaagcaaagaatctttgtcaaagctagtaaataagtcattggtcagtgtttattgagtgcctactatatgctaggattcgcaaggagctagatatgcattgatggaaaaagcaacaacccctgtagctgcttcaggaataagctggtatttgtgatctgtagagtacaatgtttattccattctctgatcagctggagattgttgaaccccctgcagatgctgttctgatcggggtcattaattaccacacagtattttgcccttagactagcctttgatttgccaagagcatctcatgagaaccagaaccatcagttaaacattcagtgtaccagtacaatttccggtggtgggtagatgctaactttgtggacttggatcaagacagaccgctggcggatacccacacaagcatgagatacttgggttatacatcaggaagaactatttgcctggaagggttataagatagtagcatgttttagaaaaaaagaggaggcagctgtcaggtagacgagggagcaggaggtgtgtcccatgcctggctaaagcctctgttaccctaagggaaaaaacagcagtgttggccgggcacggtggctcacgcctgtaatcccagcactttgggaggccgaggtgggcagatcacaaggtcaggagatcgggaccatcatggctaacatggtgaaaccccgtctctgctaaaaatataagaaattagccaggcgcggtggcgggcgcctgtagtcccagctactcgggaggctgaggcaggagaatggagtgaacccgggaggtggagcttgcagtgagccgagatcgcgccaatgccctccagtctggacaacagtctcaaaaagaaaaaaaaagaaaaaaagcagtgttgaagttacctaggtaaagaaacatggtgagataaaggtgatgcctaggggcccctatcgtggtccctgacaggcaccaacaactggggatggtcattgccaacactcatcatgtgcgtactatgtgcctggcacggtgctgaaggctgggtccacctttaactttacggctgaaaatgctatctagcgacttggctggggccagacatctattaaggggcagagcccaggtgtgaggaggctctctagaatctttcttaacagtttcacaagggctaatccgcagttaaaccaagtggaccatttgcaaacacgggattaatcgcagtgatgctgggttgatggcatgccatgcactgtactaagtgtttcatatttgtagcttcatttttgccttcacatccactctctgaattgtgggtggcatcaaggtcctgttttctcagatgagagcgctgaggctcagaaaagttctgtggcttggcaggtggtacagtaaggtgggcttttgcctcttacagtgtctccactgggggtgtctgtgaccaggcatgaggtttgcgtgaccagcatcccacagattgcacaggaccctgcctggtcgccctgtctgcaggcctgctgggcatcagggcccctccttcccagacagctgagcctgaactcgcctgctcttccttcttagaacatgccaattacttcggcgtggatgagaagctggggccagtggctgtgagcattaagcgggagaagctggaagaccacaaggagcacggacctcagtaccagtacaggatcatcttccggacccgcgaggtaggtcccatcactctcgttcttattaaagaaatcatagccactcacatctcgagccaggttctgggggcaaacgcttccccagcttcatctcatggaatcctcccaacaaccccgggagagcaatcctgttagtctctccatctcacagaggaagaaactaagacgcagaatttaaatgacttctggccaggcatggtggctcacgcctgtaatcccagcactttgggaagcttggcgggtggctcacttgagatcaagagttcaagaccagcctgaccaacatggcgaaaccccatctctaccaaaaatacaaattagccaggtgtggtagcacgcgcctgtaatcccagctattggggagactgagccaggtgaattgcttgaacctgagaggcagaggctgcagtgagctgagtttatgccactgcactccagcctgccagcctgggtgacagagtggtgagactgtgtctcaaaaaaaaaaaaaaaaaaagaaaaaaaaaattaaatgatttctataggatcagtgaaccagtagccagaccaagatttcagtccagggtgtctgacttcagagcccaacattacaaaacctgtttgcaagagattagctctaataagcataagaaataaaagggaaggtaagggatcattttaggaacatgaggtgtcctacgtaatggaaagaattaaggcaacaagcctcaggcaggacaggaactggggactctcaaccacaggtactgctgttatgccaatcagctcaaggtactcccaatgtgtcactttccattctgagtagagaagcccatggtcctggctggaagccttcccctggattaaatgtcaactgtagctagtgaggaaggcctgttggggcacccatgctctattaggactctaaattgtaagtgacagaaatctatttctaacttgcttaagtcagaaatagcattcattggttcatgtaactgcaaatctaggggtagggcaaacttccggcatagctggacttagagactcaaatgcagtctccagaactctgcttctttaactctctgcttggctctgctttttgcatcgcgagtgtcattttcttctgccactaacaagctctcaccatgtcatgggaacatggagatgggctgctcaaatctacttctttgcactgtctcttccaaaaggctcagactggccaggcgcagtggctcactcttgtaatcccagcactttgggaggccgaggcaggcaggtcacctgaggtcaggagttcgagaccagcctggccaacatggtaaaaccccgtctctactaaaaatacaaaaattagctgggcgtggtggcaggcacctgtaatcctagctactcaggaggctgagacaggagaattgcttgaacccgggaggcagaggttgcagtgagctgagatcgcgccattgtactccagcctaggtgacaaatgcaaaactccatctcaaaaaaaaaaaaaaaaaaggcttacactgatttatctgggaagaactctggctctgctttagatcacaagcccaagtcctgagccagtcgctgtgatcaggggtggtagaggaaactgcccggtctagcatgtgttacccaccttgggtccaggggcagggccaggcactgtgattgacagttccaccagagctccctggaggaggaggcagggcagatcctcagcaaaaagaggggacccagggaagcagaaatgacagagaggcccagaagacccaaataaggaagacctttcagaaaagtggcatttgccagctaggcaggccctccaaaatgggtctccctcagcctgcattgccccagccccttgggcctggcctttgcccagacatggacgcctagcaggctgaggctgccaaggacttgactgtggggccagccaagtcctggacctcatccaggctggcagatgcagctcggagtgccctcgccccatcccctgaccaagaccttcccactgagttgggggaatgggatggcatggaggctttgcagtagccaggaagaggcagccctaaagccatgtgcgccaaaccacaggtggtcaccagcctctgtctccccagccctctcctccctctacccacctttctggccagatgagcaccagagcagaatgagaggtgacagctcacactgcatctggctgttttaggacatatgggcaactgctgggtggtgaaatgacgcctacagtcatatacttataaataggctgggtgcagcggctcacacctgtaatcccagcactttgggaggccaaggcaggtgggtcccttgagccctggagttcgagaccagcctggccaatatggtaaaaccctgtctgtactaaaaacacaaaaattagctgggtatattagtgcacacttgtagtcttagctgctcgggaggctgaggcatgagaatctcttgaacccaggaggtagaggttgtagtgagccaagatcacaccactggactccagcctgggtgacacagtgagactcggtctcaaaaatatatacatacacatatgtatatataaaatatttattatgaaggctattattactgcaaatctcctttatactgtgtgtcaggcaatattctataccttttatatctattaactcacttaaatctcatcacgattctagggtgaagaccctgttgtcctcatttacagatgacagaacaggcacagagaggttaagagacttgcccaaagcaccctccagggagtggcagggcagggtgcctgcctgtgttctggccgccgcactcggctgcctctgggttttgactaagtcagcttagactgcacactggacccactcatgagttaggagctcaaccaactcagtgctagcgtttgtgtttttgttcgtaatgaaaatacaataggcggggcgtggaggctcacgtctgtaatcccagcactttgggaggctgaggcgggtggatcacccgaggtcaggagttcgagaccagactggccaacatggcgaaaccctgtctctactacaaatacaaaaaaaaaaattagctaggcatggtagcaggtgactataatcccagcttctcaggaggctgaggcaggagaatcgcttgaacctgagaggtggaggttgcagtgagccaagatcattccattgcactccaggctgggtgacacagtgagactccatctcaaaaaaaaaaaaaaaagaaaatacaatatataggcaggcatggtggctcacacttgtaatcccagcattttggggtaagaggttaagacggaaggattgcttgaagcctggagttcaagaccagcctaggcaccatagtgatacccgtgtctctaaaaaataaaaaataccagactatagcattaggagaaatacctaatgtaaatgacaagttaatgggtgcagcaaaccaacatggcacatgtaatacctatggaacaaacctgcacgttgtgcacatgtaccctagaacttaaagtataatattaaaaaaaaaaaaacccagactatgtcacacatactgagagtcgtgagactttagtgcatggatactgggttatataattttttgctgtgatttcctgttcactaagtttgaaactggcttgatgccattcccagtgtgtacctgctcccgtccacttcccacccccagcacctacaaaactagccgtgggggactctgatccatccctgatgacagcacggggactctttgagtctcacagccacaggcctgggatccatccattccacagacatttgctcagcgttcccccgtcccagctctatgctgggcatggagggtaccgtagcaaacaaggcagcaaagatgctcgtgagactgggtgtttgagggggagacaaaaggacgcagaacaccttagcaaattatgctgtaggtgcttcccatggtgacaaggtgggggacaaagcaaggaggaatgatgagtgtggcaggtgcttagattttttttttttttttttttttcccgagacggagtctagctttgttccccaggctggagggcagtggcgtgatctctgctcaccacaagctccgcctcccaggttcacgccattctcctgcctcagcctcctgagtagctgggactacaggctcccactaccacaccctgctaattttttgtatttttagtagagacggggtttcactgtgttaggcaggatggtctcaatctcctgacctggtgatctacccgcctcagcctcccaaagtgccgggattacaggcatgagccaccacacctggcccaggtgcttagatttttaacaggaaggtcaagggaggcatcactgggaaggtaacactggagtaaacctagaggaggggagagggagccgtgtggacaactggaagaagagcattccaggcagagcgaacagccagtgcagaggtcctgaggcggagccatgctccgtgggttggagacgtcctgtgagtcctagtttgaccactcagcagttctagaaccttgggcacatggctcctttcctctcagagcctcagtttcccccttggaaattctcagcttacagaactgtgttgtgggctcggtgaggttgcacataccaagcaggcagtgggggacctgacacttgactggaagtgattatgatcggcaccactgttgcagccgatgttccttcccaggaggtcagagccccatgctgggaagcataggttgagctcacggatggggttctgtccttctcatatccacacacacacatgccttggggtcctgtaaaccagggcataggggccagagcgagaggtctgggctgccttccaagccagccagcctgccccagatggccgtccccagccgccaagcagacagtctcgagtggacctgcatctcccagcagatgggatatgagcattggcagtgccaggctccccaccaaggcaggaacagacttggagctgggctttggcactgcttgtccaaaccccagagagcctggacagggtgagcgccaggccagggctgccctgtctcaggtccctttggcactgtctcacccaggacactggggacagagtggggatggcaaccagccaggaactgtgtggcacccccccacaaggcccagtggttctcattggcctagaacacgtgatttttgacaggctttagttctgatagggttagagatttgggtttttattttattggtttttcttttttatttaaaaagtaccaaacgctcattattaagaacttagacaatacataagtatgcaaagtagaaaaaggaaagtttcattagtgaaaaaagcaagtgtgaccccgtttttgttcaataggtacatctgactgtgtgtgtgtctgtgtgtatttgcttatttatttttgagacaaggtcttactctgtcccctgggctgaagtgcaatggtgcagtcatagctcactgcagcctcgaattcccgggctcaagcgatcctcctgcctcagcctcccaagtagctgagaccacaggcatgcaccaccatgcctggctaataattttgttttatttttagagacagaatctcactatgttgcccaggctggtcttgaactcctgagctcaggtgaccctcctcctttggcttcccaaaatgccgagattacaggcatgagccactgcacctggctgtgtgtatgtttaaatgaacaatctccaaagcatattgttaagtagggggaaaagcaaaaaaatgtagcttcctgcttaaggttaaaaaatttaaaactcagctaggtgcagtggctcacacctgtaatcccagcactttgggaagctgaggcgggaagattgcttgagcccaggaatttgagaccaacctggacaacgtagcgagaccccatctctattaaaaataaattaattgccaggcgtggtagctcacgcctgtaatcccagcacttttggaggcctacgcaggtggatcacctgaggtcaggggttcgagaccagcctggtcaacatggcaaaactccatctctactaaaaatacaaaaattagctgggcatggtggcacacacctgtaatcccagctacctgtaatcccaggaggctgaggcaggagaatcacttgaacccaggaggcagaggttgcagtgagccaaaatcacaccattgcattccagcctgggcgacaagagcgaaactctgtctccaaaaacaaaataaataaaaaagaaataatatttttaaaactattaactatgcatgtggctttgtacataaacatttaacacacatctacagataataatggttaacacacattgagctctcactctgtacccaagatacagcactaagcattatgcacggatctttttgaatcctttcattgccttgaggcaggcatttttatccccattttatcaatgaggaaatagggaaattaagcgacttgcccagagtcacacagctagggaggagctagagctagaattcaaacccaggcagaccacctcctaagtaacctcctaggaaatgttcttgaagggtacacctgccgcccagcacagagtcaagcggggagtacgtctgagtcaggagtgagtggggataacctgtaccagctggaacctccttgtttgcatggtactgtgtgcctttcacagctcacttgatttgttgccctcgactagctgatgccagatgttttcaggctctgagcagaggaaggctgtgatctgactcaggcagctgtagaaagaatggactggggacagggcaggggcagggagacctggaggaggctgctgtccaggtgggaggtgatggtgggggtgaccaggtggagagtgaggtggccactcatgacctgccagtgtcccacttactgtcgccagtgctgaaggagtttttcaagtagtgcgcgccgatgaggtggtcagagccaaaatgtgactgtaagtcacccgtctccagggaggaagaaggaagatttctggtccgtgctgtccctcgttcccagcagagggcactgtgggacagtgtcagtaggatataaagacactgatcctgttggtcttaactgaaacccacaaccccagggccacccagattgacagggcaaagcccccaacatcattgcttttcatgattggttttgacactaccgtgcttgtgataagagagatttgtttgtttgttaattaccggggccagaagtgggatcattctattccttccacacatgcctctcgcccaggtgctctttggtgagggtgggttgtgtgcttagaggcgaagtcatgacatgttatttttgccacctcctgtgtttgtcgacttaggcaagcatgtttttgcagttaatacttatcctccttagtctttttgttgttgttgttgagatggagtctcactctgtcgcctaggctggagtgcagtggcacaatcttggctcactgcaacctccgcctcctgggttcaagtgattctcctgcctcagcctcctgagtaactgggattagaggcatgagccatcatgcctggctaatttttctattttagtagagacagggtttcaccacgttggccaggctggtctcgaactcctgacctaaagtgatccgcccacctcgacctctcaaagtgctgggattagaggtgtgagccaccgcacctggcctcctccttagtctttaaaccacagccccaagtgtactttgggtgcttgtaacaagccccctggagagggatttttctttgtgcgttcttggtgtggtgctggtccagtgcatggcataacctggtggccagcagcatgctgtggctacaagcatgagctggtattagtgaggatgtggagcagcaggggctctcagacagggctggtggggtgtaaattggtacaaccacttggaaaactgtttggcagttcagtaaaattgaagattagcatgcctggtgatttagcaatttctatcctaggcataaacccaaaagaaaaggtgttcgtgtgcactgaggtgcttctgtgagggttcataacagcactattcacagttggcaaatactggaagcagttctggtgctcatcaacagtgaaaaggagtaaaacgtcagcctctcgcaacagcatagctgcagctcatatatgtagcattcagagaaagaagctagataacaaaagaatacaaactgcctggctgggcgcagtggctcacacctgtaatcctggcacttcaggaggccgaggcaggaggatcacttgagcctaggagttgcagaccagcctgggcaacatagtgggactctgtctctacaaaaaatatacaaaattagccaggcatggtggcacatgcctatagtcccagctgctcaggaggctgaggcaggggatctcttgcgcccaggaggtcgaggctgcagtgaaccatgattgtgccactccattccagcctgggcaacagagttagaccctgtcttcaaaagaaaaaaagaataaaaaaatacaaactgcctgaagttcaaaaatagacagatataaatgatggtgttgaaagtcaggatagagttaattttgaggaaaaaggggtacaaatgggctgtgggtgctggaaatacatttcttgatttggatagtgattacccaggtatttgctttctgatactttctttggcctcacatctatgtgttatgtactttttttttagacggagtttcactcttgttgcccaggctggagtgcaatggcacgatctcagctcattgcaacctcctcctcctgggttcaagcgattcttctgcctcagcctcccaagtagctgggattacaggcatgcgccaccacgcccggctaatttttgtatttttagtagagacagggtttcacccatgttggtcaagctggtctcaaactcctgacctcaggtgatctgcccacctcggcctctcaaagtgctgggattacaggtgtgagccactgtgtctggcctgtatactttatatatttggatatacctcaccatacacataccaaatatatatatctcaaaacaaaccacgagcttcggagaagtcaggactgggttggaatcttggttgccattttgtcagctgtggtgaccttggataaggcacgtaacctcttggaacttcaatttgcttctctgtaaatcagagataaaacctcccttgaatagacctatacatacagttattactatagtacctggagcacagtgcagtgaactgcaccttcataaatgtgacttgttattaaggtatataagttagacatttatttggctgcaaagcgatagaaaacctgactaccagtagctaaaacaaagggaggttactttaatcatctaataagtctggacgtaggcagctgcaaggattaacttctgtgactttttgttgtctctttcctcatgattgcaatctggctgccacagctccaaacatttcattctcataccactgcccatcacacaaagaagtgggcaggtggaaaggggctttcattttttttttttttttttttttgagacagtctcgctctgtcacccgggctggagtgcaatggcacaatcttggctcactgcaacctccgcctcccaggttcaagcaattctcctgccacagcctcctgagtagctgagattacaggcatgcaccaccaggcccagctaatttttgtatttttaatggagacagggttttgccatgttggccaggctggtctcaaactcctgacctcaagtggtccgcccgcctcggcctcccaaagggggctttccttttattagagggaaatctgccccagaagtcctcaccaagcacaattctcctcatatctcattgcctggaattgatcacatggttgcctataggaaaaacttgggaagcaacatctggggaatgggaatgagatggctgtgattggctttgactaaaggttttcatccctgactgcacatcagaagcacctgagaaggattaaaaatatgccatgtatgcaaacatgcatgtctggccccatcccagaccaaccaaattagaatcactggtggtgtcttgtcttgtcttgtccttttcttttcttttcccttctcttctcttctctctttcctaccctccctcctttcttttcttctcttctcttcttcttttcttttcttttctcagactgagtgttgctctgttgcccagactggagtgcagtggcgcgatcttggctcactgcaacctccgcctcctgggttcaagtgattcttctgcctcagcctcccaagtagctgggattacaggtgcatgccaccatgcctggctaatttttatatttttagtagagatggggtttcaccatgttggccagggtggtcttgaactcctgacctcaagtgatccgcccaccttggcctccccaaagtgctggggttacaggtgtgagccacccacgcctggcctttttttttttttttaaatgaaactggtctgaaaccagtgccacagttcaagatccaagatgatgccagtattcaaggcaggtgggtgttttacttgagcatttacagtaatgtgtacataatacagtgttactgtaataatgacaagagcccacctcctggtaggacctgttttcttcattatactccctactgccttacataattcatctcccccattccagtgtcagctccacaaggacaagggtctttgttcattgcacctagagtaggactcagtgcctcacaggaggcactcagccagtatatgttgaacaaatgaaggtagtttacattattgtctcatttaatcctcccaacaccccttcaaggttacgataccatcctgtacccatttcacaaaagagcaagctgaggctcagagatatgaagtcacttggtcaagaccgcacagccaggaggcagcaggttcaagttctggctcagacttagggctttctgaccttagagcacaaacttccaatcatcacacatgtctctttcaaaacaagatacctctgctatgctcttatccctttttaggtctcgagagccccctaaccttcccttctctcccttgagtagctcatcaccctgcggggctccatcctggaagatgctacgcccacagccaccaagcatgggaccgggcggggcctgcccttgaaggatgccctggagtatgtcatccccgagctcaacatccactgcctgcggctggccctcaacacccccaaggtgacggagcaactgctgaagctcgatgagcaaggggtgagtcaggggctggaggtgggggtgctgctggggcagtaccttgcaaccccactcctggtagctttttctatcttggtcactttcttttttctttgcaagtaacagaaacctacttaagctggtttcagcaaaaggagggattcaaatcaaattctagtggtgccaagagcaagaatgtaactgggtctcctaaaggagggagattgtctgggggtgagatagctgctaggtccccatgtgtgcatgcatatatgtgtctatagtggggggttagtgtgtctttcctccccgctccacatgctggctccctctgcttctcttgcctctcccacagctcccagtctgttagaattacagccacatgcagaccccagcaggctgaccctggtcacaggagagccatcgattgggctatggcgtaggtcaggtggctgtccatggcccagtcaccagtgaccagggggatccgggatacctaaagcaaacatagttattgggagcccactccctaaaaaaggtattgactataagccttgagccctccagattttgcttttgcagaatctcagcccatcccagtccacctactgtgggatgccggccaaggcaacagtctctttcatgcaagtgtggcatcaccagccgtcctccacccgccatagcgagaagaggcggcctggatacctcgttgtgcttctctggagtggaagggagggggagggacaactgggacatgctgccatgccccaacactgttttcccctgtctggctatggctctgggttcccgagtggtcccagcagctcccagggcctcaggcctcagacataccccttgctcccttccctctgccatctctgcctggcctgcctccacaaagccactcttgcctctgcagctctgccggaagcacaaggtgggcatcctctattgcaaggccggccagagctccgaggaggagatgtacaacaatgaggaggccggccccgcctttgaggagttcctctccctcatcggcgagaaggtctgcctgaagggcttcaccaagtacgctgcccagctggacgtcaagagtaagtagggggccggttagatcacagtgagccaccactgcactcctactcaacaggcaaagcttaaaaggcctggggatgccacggtggggacgtggagcagtgggagctctcagacttcacttgtaggagcacaaataagtgcagccactttattttttcgtgttgttgtacttgttgttgttgttgttgttgtttttgagacagagtctcactctgtggcccaggctggagtgcagtggcatgatcccatctcactgcaacctctacctcccaggttcaagcaagattctcctgcctcagcctcccaactagctgtgactacaggtgtgcaccaccacacttggctaatttttgtatttttagtagagacaggctttcaccgtgttggccagactggtctcgaactcctgacctcaagtgatccacccacctcagcctctcaaagtgttgggattacaggcatgagccaccacgcctggccatgtgcagccactttggaaaacagtacagcacattcaagtccagtttgaagagacgctgctctgtgactcagctcctgcactcctaggtatgcactctgtctaatgtgcacgtgcatggcaggagaggactgaatatccctaaccaccggcacctcggtgcacccagtgcacactggcagagttgcgccgtgttcacccagaggagatgaactggcaccacaggcatcagcgtggaagagagccacatgcttcgtgctgcgcaaagacagcaagcctcagaagagtgggacctgaatgatgtcttttacataacaatttttttcttttcttttcttttctttttttttttttttttgaaacagtctgcctctattgcctaggctggagtgcagtggcgcaatctcagctcactgcaacctccgcctcctaggttcaaggagttctcctgcctcagcgtcccaagtaactgggattacaggcatgagccatcactccctgctagtttttgtatttttagtagagatggggatttactatattggccaggttggtcttgaactgctgacctcgtgatctgcccacctcggcctcccaaagtgctgagattacaggcgtgagccaccacacctggccaattattattttttatagagacaaggtcttgctatgttacccagactggtctcaaacacaaggcctccagggatccttggcctcccaaagtgctggaactacacacatgagccactacacctggcaaaaaggtccagcaggatgactcacacctgtaatcccaacattttgggaggccaaggaaggaggattgctttaggccaggtgttcaagaccagcttgggcaaaaaagcaagaccctgtctctgaaaaaaaaaaaaaaaaaaaagcaaaaacaaaaacccagcaatatattgttggtggatatgctcttacacagtggaactctaaagaaaaacagagccaagcgtggtggctcatgcctgtgatcccagcactttgggaggctgaggcgggtggattgcttgagcctgggagtttgagactgcagtgagctatgatcatgccactacactccagcccggatgacaaagcaaggccccatctcaagaataaataggccgggcatggtggctcatgcctgtaatcccagcactttgtgaggccgaggcgggtggatcacctgaggtcaggagttcgagaccagcctggccaaaatggtgaaaccccatctctactaaaaatacaaaaaaattagctgggcgtggtggttcacgcctataatcccagctacttgggaggctgaggcgaatcgcttgaacccgggaggcagaggttgcagtgagccaagaccgcaccattgcactccagcctgggcaacagagcaagactccgtctcaatcaatcagtagaaaaaaaaaaaaaacaagggaatactggagacaatatgcaggatagtggttggctgtctggggagaggtgggtgtgtctaggaaacggtgctcacgttagagtgtgggtagtggtctttttcttaaggtggtatcacataggacgtatttgttgcagcagtctctgtgcttatcatgtgtatgtgtacataaatatatatgatatatggggctgggcgcaatggcccacgcctgtaatctcaacactttgggaggctgaggcaggtggatcacctgagggcaggagttcgagaccagcctggccaacgtagtgaaaccccgtctctactaaaaatacaaaaatgtaaccaggtgtggtggcacatgcctgtaatctcagctacttgggaagctgaggcaggagaattgcttgagcctgggaggcagaggttgcagtgagctgagatcacaccactgtactcgagcctgggcaacaagagcaaaacttcatctcaaaaaaaaaaaaggggccgggcgcggtggttcacgcctgtaatcttagcacttgggaggccaaggtgggcggatcatgaggtcaggagatcgagaccatcctggctaacagggtgaaacaccgtctctactaaaatacaggcgagcgcctgtagtcccagctactctggaggctgaggcaggagaatggcgtgaacccgcaaggtggagcttgcaatgagccgagatcgcaccaccgcactccagcctgggcgatacagcgagactccatatcaaaaaaaaaaaaaaaaaaaaggaaagaaaaaaatatatatatgtatatgatatataggattgaaatgtttcatgagaagtagctgggtgggtggatgggtaatgttcacaggtgtcacagctccctggggaatggactaccactgtccttgggagtgggttttcgtcagctgggagtgagaaggccccaagatggctcagtcagacattgctcttccccacacctcgccaagactcggtttgctcttctagaaaacaaaacagaagcccagatcaggagacaaatcttagagagagaagtgaggtgttaggcaggtgtctggggccatcatcaccttcccctgctcctccgctgaaggaggctgtaggaggaacgagcatgttattatgccatttgctagtttcgtgatcttggacaggtggctttgcctctctcgacctcagtttcctcatctgtagagtgaaggtaataattgcgcttatcttggaagcatggtgagggttccgtgggtcagctttgccccaaacatcctgagccctccctctgtgccgagtgcttcccagagctccgccagcgtgggtgtccccctaggtgggcggggaggcagcaggcctccctgggctcacctggcgtggaggaagctggcaggtgtgagtgttagtattggtttttttgtttttttgtttttttgagacagtctcgctctgtcacccaggctggagtgcattagaacgatcttggctcactgcaaccttcacctcctggtttcaagggactctcccacctcagcctcctgaatagctaggattacaagcacgtgccaccagacccaactaattgtgtacttttagtagagatggggtttcaccgtgttggccaagctggtcttgaactcctgacctcaggtgatccacccacctcggcctcccaaagtgctaggattacaggtgtgagccaccgcgcctggccaggaagtgggttctcttagaggaccccaggaagcatagtgctcctggaatgagtttccccaaattacaggcaagaatggccctggcttgagcagatacctgggtgttacccggctcccaacctggctctggcactggcagctgtggcctcagtgtccccgccagacactgaggcagcattgaatattattaagaacagatctggaggccaggcacagtggctcacgcctgtaatcccagcactttgggaggctgaggcaggtggatcacctgaggtcaggggttcaaccagcctgggcaatgtggtgaaaccccatctctactaaaaatactaaaattactaaaattatccaggcatggtggcaggcacctgtaatcccagctactcaggaggctgaagcaggagaattgcttgaacccaggaggcagaggttgcagagagcccacattgcgccattgctctccagcctaggtgacagagtgaaactctgtctcaaaaaaaaaaaaaagaacagatctggaatccaacagcctgagtactggtccagacgctaccactcagtacagtgtgaccttgggaaggcactccctctccatgcctcagtttcccactctgaaacatgggctcagtaagcaggtttgcctcttcctagccataaccctccctcctattagagagaactcatatcctgatgctcaatgataaccatttctttgcttttcttcatagttttgctacttacctacacatccctgactggtataatctgacctgcttttgcatgtcacatgaatgggatcacactgtgtgtgctgctttgtgtcagcatctttcactcaacatttagaggatttccccatgctgcagccgcgactcattccttttcctggctgtatatttttccacagtgtgaattgaccagtgtgttcacccattcttttgactgacgcttgaagattcttgtacccatatcccaggacacgtgtgcatgatttctctgggctgtggtccaaggaaaggaagtgccaggttatcaattaagcctatcttcaggtataagagagattgctaaaaagttttccaaagtgcttgtaccaagttacacacctaaccagccacctcaagggttccatttgctccacatcctcgccaaccattggtgctgtcagactttttaatttttaccagtctggtgggtacatagcaatggggtttcctttttatctaaatgtatttaattttttttttttttttgagacagagtctaaccctgtctcccaggctggagtgcagtggcgtgatctcggctcgctgcaacctccgcctcccgggttcaagcgattctcctgcctcagcctcccgagtagctgggactacaggcacccgccaccaggcctggctaatttttgtgcttttagtagagacggggtttcaccatgttggccaggctggtctcgaactcctgacctcagatgatccacctgcctcagcctcccaaagtgctgggattataggtgtgaaccaccaggcctggccagtgtatttaatttttaagagtagattgaagtgaaagcaccaagttaaaaaccagcacagatggtacgtgggatatggcaaaaacccagaggttttggaaacatggtcctaactggcatttctgtttcagccgactccacgggaacccactccctctacacgatgtaccaggactacgagatcatgttccatgtctccaccctgctcccttacacccccaacaacaggcagcaggtcagtgattttcagcagaggcacggctgccggatgttggctgcccacccaccagcattggccctcccagttctgtcctgtggatcatatggaggcccttgaccttggaggccatctttactatggtcactttccctgggggttagagagcagcccaggtgtggttcgagatgtcactttggccccagtctttcctgctgcttcttgggcgccctgcccagccccagctagcccgacgcccctccagggcctcttgagtcatcactggtcttaagaagaagagtgaatcagtcaacattattttgactgcaagtaacagaaactcacaccaaactggcttaactagaaaaagagatttatgggttatataactctaagattgtagagagggctggcctcaggtctggttggatccagggactccaacaatattaggaatccttccccatttctcacctccacttttctttacagcagctttattcacaggtgcaaagcaaagatacctcctagcagccctaggctcacatccaccagcttagccacctcagcagaaagagtgctgttttttccagttgtcccagaagtgtttcagagctgagtctcattggactattcacatgccagtcttggggcctggggtaggggtggaaagggcagactggccaagcccgaggctcatgcccaaccctagagagggtgagtggtgccagctcaacttgaaacggatggaggttggggaggtgctttcctgaactgggtgggtgtggctgccagcaggaggcagggataccaggtgggcagcgccaccaaacactcattgccaagaggctgcagctgtgacccggctcctctcttggacccaccttgcaggctgggcccacagagcaattcttccagttcctaatgaacagaagccccagagtgctgacagtttaggaagtaagtgtacgtattttcccagttggcacaagtgactttgtaggccaaaaatgctcaaatattgatttcctaaggttcatctaaaaacatgctattaagagctttggtcttaggccaggcttggtggctcatgcctgtgatcccagcactttgggaggctgaggcaggcggatcacctgaggtcgggagtttgagaccagccaggccaatatggtgaaaccccatctttactaaaaatacaaaaattagctaggcatggtggcgtgtgcctatagtcccagctactcaggaagctgaggcatgagaattgcttgaacccaagaggcagtggttgcagtgagctgagatcatgccattgcactccagcctgggcaacagagcaagactctgtctcaaaagagaaaaaaaagcaaaaaaaaaaagcgctttgatctcagaattagacctgaatttgagttctttcttggctacttcctagctgtgtgatctcaggtaagtgatctcacctctctgggccttgagtccctgctgtgtaaaatgggtataatcgtagtgcccctgaatcagggtcattgagaaaggtccatatactcctgcggcaaccggagcgtgacagggcccgacacacaggaggggcgcagagagcagtgccttttcctgagtatgtgggaggggcgctggggaaaagcttgagtcgtagagttaagaagtgggttagaatccaggctctttccctccatcactatgtgacttaggtaaaattacttaacctctgtgagcctaagttttctcatctgtaaaatggggcaaaatgagttaacgcctctcggggttgttaagagattcattgagatgatgaattgaagataaggctgtgcagtgtttagtacaggaccagccacagtcaatagctgctttagcgatttgatttaatgccacttaaaactcacataaagaactaaccattcaacagtaggagttgagctgcaaagcgtgtctggagttcacactgtgagccatgtcacttagagctccgtgggactcccgtccatggatctcctgcattggcagattctttaacagctacatgaatgctagaactgtgtaaataagaacaatataataggctgggcttggtggctcacacctgtaatcccagcactttgggaggctgaggcggagagatcacctgaggtcaggagttcgaggccatcctgaccaacatggagaaaccctgtctctactaaaaatacaaaattaactgggcgtggtggcgcatgcctgtaatcccagctactcaggaggctgaggcaggagaatcacttgaacccaggaggtgcaggttgcagtgagccgagatcgcaccattgcactccagcctgggcaacaagagtgaaactcagtctccaaaaaaaaaagaaaaaagaaaaagaacaatataatctcagcaaataagccaaacactgtgaatacggcgtcacctgtgaagataacagagtcttcctcggagactgaccagcaggggagaggtgtattagtccattttcacactgctaatgaagatttacccaagactgggtagtttataaagaaaaagaggttaaatggactcacagctccacatggctggggaggcctcacagtcatggcagaaggcaaagaagaaccaaaatcacatcttccatggtggcaggcaagagagcttgtgcaggggaaccacacttttataaaaccatcagatctcgtgaaacttatttactatcacgagaacagcatggaaaagacccacccctatgattcagttacctcccaccaggtccttcccacgacatgtgggaattatgggagctgcaattcaagatgaattgtagggtgtggacacagccaaaccatatcagagggtgagagtcccatagggcactcggaagccacagccatcctgacctcagtcagggtccagggaaggggtggcgcctataactggccctgccagtgacctgggatctgactctgccattgtccatgggtgtggctttgagcaagttgaagaccaccagcctgtgctctctggatcttacttattgagtacctcctgtatgccaggcactgtgctgggtactgaggatacagcagttggccgtgaacaaaatccctgttctcatggagctgccacttcaatgggaagagacaagaaacaaaatgaagtggggaaagccatctctgctgagtgtcaataagtgttaagtaatggggacagaaaagcaaagatcagggagtgttgtggtggggtggatctgaataacgtagtcagcaaaggcctccctgggagggtgaggtttatgcaagaccagaagaggtgacgaaggaagccatgtggggactcaggaagaatgttcctagcagagggaacagcggtgcagaggcttcgaggaagtgtttctggccatggtgaggcctttgtcctttatcctgaatgagagggaaccacaggaaggtttgtcacctgactcgggcattccttgggctgtgtgtgagcagggagtgggaatgggggtgggtggggggagctgtggcagtggtccaggcaggacccgtcaggccgacctgtgacaggttcctgtccccctctgttgccctttcccagctgctacggaagaggcacataggaaatgacatcgtgacgatcatcttccaggagcctggcgcgctaccgttcacccccaagaacatccgctcccacttccagcacgtcttcatcattgtccgagtccacaacccctgcactgataacgtctgttacaggtatgccccccacacccggcccccagcagcgtatggagagaggggcaggcagctggcccaagtgggtcccagtacagggcccccccacacctcacgttgtgcttcaggagaagagctcggcgtatactccccacaccatctcagagagtggtttttagccagaaaggggcatggctccccacttttgctaaggaaaccatcagggatttgtatttgcttgtaatcttttgtttcaagtgacagaaaacccatgtcaatgtggcttaagacaaaaagacagttgtgtatataggctctcaaaagtggcacctttaggcctggctggatctgccaccgccctcctgggggtcacctttccagcaggtctgaggtgaacatcctaccagctgcaaatcccccaaaatgagagcttttctttcccaagagttgcatcagaagccccagaattggggctcactggcccagttggagtcgtgtgcctgtcctagagccaaaatcaccagccaggcctgggcactgggcttcaaggaccaagaggcacgagtgatggcccagaggaaagtcggagggaagcagggcctacctgtggaggtaggccccactttggaggtagaattgaggaggtttttgttgttttgggtttttttttttttttttaagacagggtctcactctgtcacccaggctggaatgcagtggtgcagtcatagctcactgcagccttgacccccccgggctcaaacgatcctcctgcctcagcctcctgagtagctggaactacaggtgcacacccccatgcctggctaattaaaaaaaaatttttttttagtagagatggggtctctctgttttacccaggctggtcttgaactcttggcctcaagtgatcttccagcctcagcctcccaaagtgctgggattgtaagtgtgagccaccgcacacagctgagatcttttcgtacctgtacatgaagtgctttttgttctttctgatacttcatattccattgtatggatgtggagtcatctcctgtcctctactgatgggtattacggttgtgatgcctgcaatgaacagtcttatttatagtctgattgcgcctgagtccaagcatacagctgtaaaagaaattctagaaatggaggtgctggagcagaggacgtgtgtatgtgcaccagtagtcaccgcgaaattaccgcgggtctaccagctgcctccctcggctgggtgagggaagggaggggcatcccagcctgcagcgctggttgtctagcacctctgtgctgcacatgttgcccgctggctactgggagccagcacactgcatggcagggcctccttacaggcatgtccctggacctgaggccacctctccccctgcccatcggttcctggaacatgcagcagcagctacagagtgcctgcacctcaggccctttttggggttgaggacccttggatgagatgggagatatttacacacatgcacacgcacacgtgcacaggcacatgcacacacacacatgcatgcacgcatccgtgcacacatgcacatgcacacacatacatgcacacacgtacatgcacacacatgcacacaggcacacacctgcacacaggcacacacatgcacacacacgtatgcacacaccatgcgtccacacatgcacacacacgtatgcacacaccatgcgtccgcacatgcacacacctacatgcacacacatacatgcacacacatacaggtacacacctgcacacaggcacatgcatccacacacatgcacatgcacacacatacatgcactcacacaggcacgcataaacacatgcacataacacatgcacacacctgcactcacacaggcacacacaagcacatgcacatatgcacacacatatgcacacatacatgcacacgcacacatacacacatgcacacactggaaaaggaggcagccttcttatgatgcatcagaggtggagggttgagctggtggggggagctgctttctcttcttcgtccccactctgacctcccctctcctactggggtcatcacatcagcctgcagctgacctccctcccttccgggctcgcctctgcatggtctccagagtgatttcttctctctcacacacaaacctttcttgttttttataatttaatttaaaatatttttattatgcaatattttaaccattctgaaaaatgcagaaaatcatttaacagagacccatgtgcccaccgccagctttaacagatgttaacattttgctttgtttgcttcggctctccctctttccttcatttttaaagaaagaaaatgttagagatacaaccaaagctgctcctcagccatccccctcccttcccatccctctttccccacaggcagctcctctctggacagacctgaccctgcctctaccctgtggagggagcccggacacagctctccagcttaccatctcctgaaacccccaactcctgtcccccaactcagtgaatttctaattgtccttcaagactgaactcagggcgaggtgcagtggctcacgcttgtaatcccagcactttgggaggctgaggtaggcagatcacctgaggtcaggagttggagaccagcctggccaacatggtgaaaccccatctctactaaaaatacaaaagttagccaggtgtggtggcaggtgcctgtaattacagctgttcctctggaggttgaggcaagagaatcgcttgaacccaggaggcagaggttgcagtgagccaagattgcaccactgcactccagcctgggctacagagcgagactccatctcaattaaagaaaaaaaaaaaaagactgaactcagatgagcctctgacaccctccagtggttccttacctgctccatgtgccattgcccaacatgtttctgtcatagcacacatgacaccataaaaatgatatgatgggctgggcatagtggctcacgcctataatcccagcactttgggaggctgaggcaggaggatcacttgagcctgggagttcaagatcagcctggacaacatagggagaccctatctctaaaaaaacaatttacaagttagccaggcatgctggcacgcacccataatcccagctgaggtgggaggatcgcttgagcccaggaagtcaaggctagagtgagccccattgcactccagcctgggtgacagagcaagactctctcaaaaaaaaaaaccaaaaaaaacggaaaaacagacatcacgtggctgttgcctcctttgacagtaaccccatttcatgtttagcttcctgtatctgtcacagcacagagcttggcacatagtgggccctaaagccatctttgcttggctggaaagacacctggcccaaatgttgcaggcactgaaaaaataattgttgaataaataattctgagtgttctagcaacgcttcttgccctctggtgatcaggtgaccaccaggtcccctcgtctgctggttgtttcgtgagttttcatcctttctgtttcaagtgtgcaatttccgaatggccacccgcatcatccctgcagcctgtggactctcaaaacccagtccctcctgctgggaagtaagggaccagctgttctgatggctcaaaaaccttcagccgtttgcaattttatgatttgtgaaatcatgaatcaggaatataggaaaagcctaaatctgtcactataagcagctaagtgctgaataaagaagttacaaagctcggctgggtgctgtggctcatgcctgtaatcccagcactttgggaggccaaggtaggtggatcacctgagatcgggagttcaagaccagcctgaccaacatggagaagccccatctctactaaaaaatatataaaattagccagtcatggtggcacatgcctgtaatcccagctactcaggaggctgaggcaggagaatcgcttgaacccaggaggtagaggttgcagtgagccgagatcatgccattgcactccagcctgggcgacaagagcgaaactcttgtctcaaaaaaaaaaaaaaaaaaaaattgcaaagctcttcatctctgtaaagtgcaatctgacaatctgactgccccattcagtagagagagggacaggggaggtcatctcatccatccccctgcctggggtaaggccatgtccacaagatttcccacagaagaaaatttacctggtgtgtgtggcattctttgaagcatgtccgctctggaaaatgcctttttctgttaaaactatgcccaccataccttggtagaaacctgtttcgtctgtccatgtttaaaccattactttagtcagcattgagcaactgtgctggggaatccactaagcctagggcggcatccagccacgtggcactcctggggcatgaaggatcactagccagtcaacgccagagatggagagcgagggggatctggcctgatcggccggggtcgcgcagtagctcccacactggtctcctgcatgtgccctgtcctcccgtccattcttcatgaggcagccacagtggtctccgcagattgccaatctgttgtccctctgccagcacctgcctctgttgggaacccagcgagaagcagatctccctcaaggatttaaccaaagggagttgatgccactgacagaggtgtggggagcttacgggaaccatgtgggaagatgctgcatccagggactagccagagcaggaacctttatccacccccaagccttgatgggctcagagggagacgggagatgtttctgaaagctgatgagagctgtggccctgggagaggggcggcccaacaggagcagtagctgtaagggaccaaagatgacagccactgacagtttcatcacagcccctcacagtggaagggaagagaaataaatactccagcctctctcctcccaccttcccattccctgctggtgcttctcattggccaaactcagctggaagccccagggcacaggaacccaggtgacagagctagagagatcttccttcctgagcacagagcagggcagagaacggcagaatggatcagagggggcagacaggaaatggtttcaccaccagatcagatcattaaatggttgcctgctcccatggtaaggataggaagtgctaactcaccagggccccgtgtggccttgcccctggtgacctcatggcctcctgctccttgccttccgggccatgcccaccctggccttccctagtcggctgctacctgtgctgcaccccctggctgcagcactctcccccagctcttcctctggttccactcagcccttagatcccagcttcatcatcacttgctcagagaggccctcccagattctccctgtccaaatcaggtctttctctagttctgtcataacatgccctgttccctttcctcatctttatgagtttatctctgtgtgttgatttggtatgtcccttctcctggactagaagctctgggaaggcagggaccacgttatccccaatgcctaagagcgtggagtccaggaagtgcttgtcaaacaaatggatgagtgtcgcactgtcgcccttgtctagagttgggggtaaggggagggaatcaacaaaacctgggcaagcatgactttgggttggagtttcatggagtgtttttaatccataatctctatttttttaaattatcctacagatggaagagaaacagtaggaattctgtcttgacactgtactgacaaataggttttaatcaaggatgaaaataccatacatttttaggaaagcatagttaacttattgcatcaccctgtgccattaagaaacataaagagaccgggtgcagtggctcacacctgtaatcccagcactttggaagtccgaggcgggcggatcatgaggtcaggagttcaagaccagcctgaccaacatggtgaaaccctgtctctactaaaaatacaaaaattagccaggcgtggtggtgcatgcctgtaatcccagctactcaggaggctgaggcaggagaatcccttgaacccaagatgcttgaacccaggaggcagaggttgcagtgagccgagatcgcgccactgcaatctagccagggcaacagagcagcaagactctgtctcaaaaaaaaaaaaaaaagaaagaaagaaaagaaaaagaacaggctgggtgcggtggctcacacctgtaatgccagcactttgggaggccaaggcgggcagatcacttgaggccaggaattcgagaccagcctggccaacatagtgaaaccccatccccatctctaccaaaaatacaaaaattagccaggcatggtggtgcacgcctgtaatcccagttaccccagagactgaggtgggagaattgactgaacccgggaggtggaggctgcagtgagctgagatcacgccactgcactccagcctgggcgacagagcgaggctccatctcaaaaaataataataatagaagaaacatgaagaacataactcacctgccctgggtgaatattctggcaggtgccttggcctttttgtgcacttttagcaataatctgccaaaaggccactgagcctctatttaatttggtcatcagagcatcacatccaagatattcatcaaatctccaaatgtgactcatcaacagatcttctccctgtccgggctcagggctccttccgcccagaagcctcgatgggttgagagcctggttacctctcctgcttctgcaccttgcacttctcctcctcccagccctgctcactgccagtttctgacccatccagggttggagtgtagggaggaaaagggaggcagggaagtgccatgtggactgtggctggagctggctggctgctcgccgggctcttcaggggcttcctgcacaggcaggagacagatcccagtccgctcgctgctataaggatcacctaggggctgggcgcagtggttcatgcctgtaatcccagcactttgggaggccagggtgggtagatcacttgaggtcagtagttcaagaccagcctgaccaacatggcgaaaccctgtctctactaaaaatacaaaattagccaggcgttgtagcaggtgcctgtaatcccagctacttgggaggatgaggcaggagaattgcttgaccccgggaggcggaggttgtggtgagccgagattgtgccattgtactccagcctgagctacagagtgatactccatctcagaaaaaaaaaaaagagcattacctatggggtccctcctgctgcggggtggggaagggagagaatggggctcacccaccagctttctccacaagttccttttctctctccatagtttaaatagtgggaaatgtggtataagagcttgggggaacagagtcttcagatcattttctctttttttttgacacagggtctctctctgttgcccagcctggagtgcagtggcacattcttggctcactgcaacctccgcctcctagattcaagtgattctcctgcctcagcctcccgagtagctgggactacaggcctgtgccaccacacccagcctcattttctctttacgctctcctgagttgctatcagattttgatagcgcctccatcaaaacttcctgttacaatgaacttcctttattaattttttttcttctttaaacctcagcatctaccagaggaatgcaatgaattttcaaaataacctttgttaagatgacttacaaggtatacttgtgtaacacaagtgttcaaaagaactaaaactcataaacattctacatcagtcagctattcctacaataaagccgtataacaaaccacccaagggctcagtgacaaacgttaatgtttctttctggcttacaaaaaatacaaaattacccaggcgtggtggtgggcgcctgtaatcccagctactggggaggcagagacaggagaatcgcctgaacccaggagacagaggttgctgtgagccgagattgcgccactgccctgagggagtaggtttttgccaaactgtaagatctgccacacggtctatgtatttaaaacaggaataagtgaacagtccttggaggattaccctttgatgtcagaggatgttcagacatctgctttatagaaaatgtgtatgtgccctaacacttttttttttgagacagtctcgatctgtgccccaggctggagtgcagtggcgccatcttggctcactgcaacctccgcctcccaggttcacgccgttctcctgtctcagcctcccaagtagctgggactacaggcacccaccaccacgcccagctaatttttgtatttttagtacagacggggctttaccatattggtcaggctggtctcgaactcctgacctcaggtgatctgcccgcctcagcctcccaaagtgctgggattacaggtatgagccactgcgcccagccgactttttattagatttcgaatctggttagccagcaacttactaattagatgtggactttcattcttcagaaggaaactggccgcgtgtggtggctcacagctgtaatcccaacactttgggaagcccaggaggtaggatggcttgagcccaggagtttgagaccagcctgggcaacatagtgagacctcgtctctacaaaaaataaacaaaattggctgggcatggtggtataagcctgtagtcccagctacttgggaggctgaggcaggaggattgcttgaggacaggaggtcaaagctgcagtgcgctatgattgcaccattgcactccagcctgggtgacagagtgagacctgtctcgataaaacaaacaaacaaaaaaccctattcctattttttgatcgaatattttctctctgaagtgtcttagtgcctttcttcccaccatctaaataatctctccctccacagtatggctgtgacccgatccaaagacgctcctcctttcggcccccccatccccagtggaaccacattccgcaaatccgacgtcttcagagacttcttgctggccaaggtgattaacgctgagaacgccgcgcacaagtccgacaagttccacaccatggccaccaggacccgccaggagtatctcaaggacctggccgaaaactgtgtctccaacacccccatcgactccaccggcaaattcaacctcatctccctgacctccaagaagaaggaaaagacaaaagcacgggctggcgctgagcagcacagtgcaggggccatcgcctggagggtggtggcccaggactacgcccagggggtggaaatcgactgcattttgggaatttccaatgagtttgtggtgctcctggacttacgcaccaaggaggtggtgttcaactgctactgcggggatgtcattggctggactccagactcctccacactcaaaatcttctatggacgaggagaccacatcttcctacaggcgacagagggttctgtggaggacataagggagatagtgcagagactgaaggtaagggagagagcccggcgatagggcggcgatttgtatggtttcggcctcaggaaccactgaaatacttccctagcccagtcagttaggctaagacacgcactggcccggagagaatcacagttgtcacttacaaactagacatcttgtgggttctgtagctaggttcttcctctggaaggtttgtgccagagatctgtggatcttcatgctattaccttggaaagacaagagatacttattaaccttggacactgatagaaagtataaatttaagcttaggttaaaaatgtaggccaggcgccatggctcatacctgtaatctatctcagcactttaggaggctgaggtggtggatcgcttgagcccaggaatttccagaccaacctgggtaaccatagtgagactctgcctacaaaaaaaaaaaaaagaaaagaaaattagggaagcatggtggtacatgcctgtggtcccagctacttgggaggctgaggtgggaggattgtttgagcccaagaggttgaggccacagtgagctgagatgacgccactgcacttcagcctgggcaacagtatgagaccctgtctcaaaaacaaacaaaaaaaaagaagtgtaagagtactttctaaaataattaaaatagaatgaaaaatgtccaaaccattaatggatagggcagaggtgagaggaggaaaaaatacaagaaagcacaaaggaacataaaattacatggcaggaatgagttccatgttagtaatcacagtaaatgtgaatggtttaacttgccctattaaaagacaaagactcacagtctaggtagaaatcttcccctaaacccctcgtggacaaaccaagagtggcagattggtgatagcttagctgctgtctgcctgaagcattgtgctgagaagtactcaggccccatctaagctccacaagaaagaacactgtggtcagtgattgcctctgcagtgggtttggcagaacgccgtgccatgtgtgctaaatagagatagcatataacacggcagttcagagcacaagatctagtcagaaggcctggcttcaagtcccagcactgccacttaccagctgcatgaccttgagccaagttatttagcttctttgtgattcagtttcttcatctgaaaagcaggtacaagaatcattctgcattgctgggtgcagtggctcatgcctataatcccaacactttgggaggccgaggagaaaggattgcttgagcccaggagtttgagaccagcctgggcaatacagtgagatgccgtttctaaaaaaaaaataaaaaaataaattagccgaggcaggtagatcatgaggtcaggagatcaagaccatcctggctaatacggtgaaaccccatctctactaaaaatacaaaaaattagccaggcatggtggtgggcgcctgtagtcccggctacttgggaggctgaggcaggagaatggtgtgaacccggaaggcgaggcttgcagtgagctgagatcacgccactgcgctccagcctgggtgacagtgctagactctgtctcaaaaaataaaaataaaaaataggccgggcgtggtggctcacgcctgtaatcccagcactttgggaggccgaggtgggcagatcacaaggtcaggagattgagaccatcctggctaacacagtgaaaccccgtctctattaaaaatacaaaaattagccaggcatggtggcgggtgcctgtagtcccagctactcgggaggctgaggcaggagaatggcgtgaacctgggaggcggaggttgcagtgagccgagaccctgccactgcactccagcttgggtgacagagcgagactccgtctcaaaaaaaaataaataaacaaacaaaaaataaattagctgggcatggtggtgcacacttgtggcctcaactattcaggaggctgagtgggatgatcacttgagcccaggagtttgaggctgcagtgagctatgatcacaccactgcactcgaacctcggcaacagagaaagacccggactcaaaaaaaaaaatgaaaaagtggccaggcgcggtggctcacacctgtaatcccagcacttggggaggccgaggtggatggattatttcaggtcaggggttcaagaccagcctggccaacatggtaaaacctcatctctactaaaaatacaaaaattagccaggcgtggtggcacacacctgtaatcccagctactcgggaggccgagggaaaagaattgcttgaatccgagaggcagaggttgcagtgagctgagagtgagccactgcactccaacgtgggtgacagagcaaaactctgtctcaaaaaaacaaacaaaagcaaactcctgtgttcctccccacccctctcagaggtttcctgactttgtaaaatagaagtcctctactcaaataaggttttagggaaaaaaaggtcgactccatccctccatttgcggatgtcagagctttggcatcagcctgggctccactctctctcatgcccacattcgtcagctccacttctgtaggcaggcatcagccacctctcccagagccctcaccctggagcgagccaccctggtctctcccggacactttcgatggtgtcctttctggtccttcttacccctgcccttgcttctctgtggcctgttctcgacgtggtagtgagagcaatctgatcacatcacctctctgcctaaaccctcaggtcactctaggttaaagcctcagtccttacagaagcccatgaggccgggtgtgaactggctccctgtcgacttctctgacctcatgtcactgttgcgctctctgccccagccatgaagacctctgaggtttcatgcgcatgctagggcggcgtccagcctcagggcctttgtaccacctcttgctggaacacttctctgatcaccacatggctcgctccctttcctcctacaggcctttggtcacatgtcgccttgtcggtgaggcctcgttatctaagattgcacaccccctcccctggcttggagcacattcacgcgctttgcctgcttaaccaccatctgccatgcactgtgtgttatctgttcactgccgtgtcctcagcacctgggccagcatctggtgcacagtagccgctgagtgagcaggaaccgagtgcaggcacaaatgcgtcgtatgctatagtggccgcaatagtgaggatcaaatgggcgccagctctgcgtcagaccctgctcagcaccttgggtggtcttgcgtctcttgctcacaaaagcctgatgaggtcctcacttcgcagatgaggaaactgaggcccagagataccttgacttgcccagagcccaaagagcctgggttttggagttttttttttgttttttttgttttttttttaattgatcattcttgggtgtttctcacagagggggatttggcagggtcataggacaatagtggagggaaggtcagcagataaacaagtgaacaaaggtctctggttttcctaggcagaggaccctgcggccttccgcagtgtttgtgtccctgggtacttgagattagggagtggtgatgactcttaaggagcatgctgccttcaagcatctgtttaacaaagcacatcttgcaccgcccttaatccattaaccctgagtggacacagcacatgtttcagagagcacagggttgggggtaaggtcacagatcaacaggatcccaaggccgaagaatttttcttagtacagaacaaaatgaaaagtttcccatgtctatttctttctacacagacacggcaaccatccgatttctcaatcttttccccacctttcccccctttctattccacaaaaccgccattgtcatcatggcccgttctcaatgagctgatgggtacacctcccagacggggtggcggccgggcagaggggctcctcacttcccagtaggggtggccgggcagaggcgcccctcacctcccggacagggcggctggccgggcagaggggctcctcacttcccagtaggggcggccgggcagaggcgcccctcacctcccggacggggtggctggccgggcggggggccaacccccccccacctccctcccggacggggcggatggccgggcagaggggctcctcacctcccagtaggggcggctgggcagaggcgcccctcacctcccggacggggcggctggccgggcggggggctgaccccccacctccctcccggacggggtggctgccgggcggagacgctcctcacttcccagacggggtggttgctgggcggagggtctcctcacttctcagacggggcagctgccgggcggaggggctcctcacttctcagatggggcggttgccaggcggagggtctcctcacttctcagacggggcggccgggcagagacgctcctcacctcccagacggggtcgcggccaggcagaggcgctcctcacatcccagacggggtggcggggcagaggcgctccccacatctcagacgatgggcggccgggcagagacgttcctcacttcctagatgggatggcggccgggaagaggcgctcctcacttcctagatgggatggcagccgggcagagacgctcctcactttccagactgggcagccaggcagaggggctcctcacgtcccagacgatgggcggccaggcagagacgctcctcacttcccagacggggtggcggccgggcagaggctgcactcttggcactttgggaggccaaggcaggcggctgggaggtggaggttgtagcaagccgagatcacgccactgcactccagcctgggcaccattgagcactgagtgaaccagactccgtctgcaatcccggcacctcgggaggctgaggctggcggatcactcgcggttaggagctggagaccagcccggccatcacagcgaaaccccgtctccaccaaaaaaatacgaaaaccagtcaggtgtggcggcgcgcgcctgcaatcgcaggcactccgcaggctgaggcaggagaatcaggcagggaggttgcagtgagccgagatggcagcagtacagtccagcttcggctcgggatcagagggagactgtggaaagagagggagagggagaccgtggggagagggagagggagagggagctgttttgttttttgagatggagtcttgctctgtcccccaggctggagtgcagcagagcgatctcggctcactgcaacctccacctcccgggttcaagcatttctcctgtctcagccccccaggtagctgggactacaggcgcccgccaccatgctcagctaatttttgcctttttaatagagatagggtttcgccatgttggccaggctagtctcgaactcctggcctcaagtgatccaccctccctggcctcccaaagtgctagaattacaggcctgagccactgtgcccggccaagcctgggttcttaaacactaggctactccgcctcccctaatcttgacagcagctcgcgtttcttgagcagggaccatgccaggcaccatgccaggtgacatgttttacccacatcctcactgtgccactctgtcccacacccacccccgtgcctactgttggcggagtccttttggagcatatttccacagccatacccccacccccacccccagtctcagtgccccagagcctgctggggaaccagtgggccagggaatggtgacataagccatctcccgtggaggggcaggcccgttttgaatgacttgtgacagtgagtctctctctttgtgaagcacccacagggtacagattccacactctccccggcaggctgactcaactgccccagacatcctgaactaacggtatcccatcactggttaattgaatgagtgttgttatgcgcctggccttggcctggccagtgctgggacatagtgatgaccataacagacccaggcctactttcatggtgctcctctctgggacagatattaaacacgcaattcggccaagcgcggtggctcacgcctgtaatcccagcactttggaaggccgaggcgggtggatcaccaggtcaagagatcgagaccatcctggccaacatggtgaaaccccatctctactaaacatacgaaaaaattagccgggcgtggtggcgggctcctgtagtcccagctactcaggaggctgaggcagaagaatggcgtgaacccgggaggcggaggttgcagtgagccgagattgcaccactgcactccagcactccagcctggtgacagagtgaggctccatctcaaaaacaaaaacaaaaacaaaacaaaacaaaaaaaaacaccacgcaattgaagtgccaagagcttaaaaggggggtgtggaggatgccaggagaacctatcagatggtgctaaatcagacaaggagaaggtctcaaatccacaggttggatacagtcccagatgtatttagttagttaccacagtttaacatttagagcaagcttgtccaacctgcagcccaagagggctttgaatggcacccaacacagattcataaagtttcttaaaacattatgacattgtgagtttttttgtgatttttttaagcttatcagctatcattaatgttagtgtatttcatgtgaggcccaagacaattctttttttttttctttaagacagtctctctctgttgcctaggctggagtgccatggtgcaatctcagctcactgcaacctccgcctccccggttcaagcgattctcctgcctcagcctcccaagtagctgggattacagatgtgcaccaccatgcccagctaattttgtatttttagtagagacggggtttcaccatgttgcccaggccggtcttgaactcctgacctgaggtgatctgcccacctcagcctcccaaagtgctggaattgcaggcatgagccactgtgcccggcccaattttactttttaattatagaaaattgcaagcatacactaaagcaaagggaatcatataagaaccccagtcttggccggctgcagtggctcacacctgtaatcccagcactttgggaggccaaggcagttggatcaccagaggtcaggatttcgacaccagcctgaccgacatggagaaaccccgtctctactaaaaatacaaaattagctgggtgtggtggcgcatgcctgtgatcccagctacttgggaggctgaggcaggagaattgcttgaatccaggaagcggaggttgcgatgagccaagattgtgccattgcactccagcctgggcaacaagagcgaaactccgtctcaaaaaaaagagaaccccagtcttcattaccatctacaatagttactgacccatggctgatcttgttctttcttccttccctctctttcccaattattttgaagaaatcctagacatcttatcatttcatctgtaaatttttcaatatttatttctaaaagatacaactcttaaaacataacatagccatcatacataaaataaaaaattaacgataattccttattgtcaaataaacacattgtcacccatgagtgggctataaaatcaatcacagagatgtaattttttttatttttaattttaactttaatttttaaagacaaggtcttggtgtcaccccggctggagtgcagtggcacagtcatcgctcactgcagtgtcactctcctgggctcaagcctgcctcccacctcagcctcccaagtagctgggactgcaagcgtatgccaccatgctcagctaattttttttttattttatttttagtagagatgaagtcttgctatattgcccaggctcatcttgaactcctgggctcaagcagtcctcctgccttggcctcctaaaagtgttgagattacagagattacaggtgtgaggcactgcactcagcccgagttgcaacagtgttaaaggttagatatcttagtccacttagcctgaatataacaacatagcttaggtggggtagcttataagcaaaagcaatttatttcttcgcatttctggaggccaggaagtccaagataaaggtacccgcaggttctgtatctggtgagggcccctttcaacttcacggatggcaccttcttgctgtcatggtggaagaggtgaacaagttccttgggcctcttttttttttttttttttttttttttttgagacagtctcgctctgtcgcccaggctggagtgcagtagcgtgatctcggctcactgcaacctctgcctcctgtgttcaagcgattctcctgtgtcagccccctgagtagctgggattacaggcgtataccaccacgtcaggcctcttttatatgggcactgatccccttcatgagggttctgccgtagtaataggatgggaaagaataaaaagtgtcacagtgtgcctcagtgagtaaagataagactattttatgaagcattgttttggtcacacgtttcccccactttccaaattctcgccgtccaaatcaggaaccaaacagattcagtgacattttcaggtaagtactttaccatccaaatgcttacttcttgctatccacactcaagaatgtgacggatttgaattgcaaggaatatttgtgtctgtgggcatgtgtgtaaaacacgaatgtgtagagtagtttgtgacgtaaaattatttctaaaacacgaatttgtagagtagtttgtgacataaaattatttctttccttggccgggcgcagtggctcacgcctgtaatcccagcactttgggaggccgagacaggtgaatcacttgaggtcaggagttcgagaccagcctggccaacatggtaaaaccccatctctactaaaagtaccaaaattagctgggtgtggtggcagatgcctgtaatcccacctactcgggaggctgagacaggagaattgcttgaaccagggaggcggaggtggcagtgagctgagatcgggccactgcactccagcctgggcgacagcgagactccgtcttaaaaaaaaaaaaatttattcctttcttcaagtggtggtgagaaaagtatgaaagcgggcatcctgataggtatgttacatagcatcatttctagccaggggatgacttctcacaggaaatgtaagccattccgttatctttccataacgcagttttaggaaagggcaggcattcttgacaacttgcttaatagccatggctggttacattcatcttgtttttatcccaagaagaggggatcgcttaacagcatgctggggggagggggcagggctctattcagcaggtcctcagatcttatggtaacacattatccaggggaatatctcacccagtgaagcagggagtcctggaggccaggccctgcgtggtccgatcagctccatgttgggggaaggtctgaggaggagatggggaaagggtttcttcctccaagaatggtgtcacgaggccgggcatggtggctcacgcctgtaatcccagcactttgggaggccgaggcgggcagatcatgaggtcaggagttcgagaccagcctgaccaatatggtgaaaccccgtctctactaaaaatacaaaaaactagccgggcatggtggcgcgtgcctgtaatccctgctactggggaggctgaggcaggatacttgcttgaacccgggaggcggaggttgcagtgagccgagatcacgccactgcactccagcctgggcgacagagcgagactctgtctcaaaaaaaaaaaaaaagaatggtgtcacgaagtaaaagaatataatgtgagttcccaacctagaaaaggtcccagtacttctggtctcatgcttccttgtgtattttagttagagtcattgtgtcagtcaggatacagtattagtggcttaaagcaggtttggctgggtgtggtggctctcacctgtaatcctagcactttgggaggctgaggcaggtggatcatctgaggtcaggagttcaagactagcctggccaatatggcaaaaccctgtctctactaaaaatacaaaaattagccaggcgtggtagcagacgcttgtaatcccagctactcaggaggctgaggcaggagaatcgcttgaacccaggaagcagacgttgcagtgagctgagatcatgccgctgcacttcagcctgggcgacagagcaagtctccgtctcaaaaataaataaataataaaatgatgaaataaataccacagcccagaggacatggcagtgccactcgcaactctttggccaaaacaagtcccagggccccacccaaccacaagggagccaagaagtgcaatcccactgaccccaggaaggagggagttcggggcctttggagccacagctcatgactgccatggtctctgcaaggttagaagccacggggtcgcatatccacatttcccctccagaaatcaggaagccaggctgggaccgggtgcgtgttccccctgcgggtcccctgccatcacccgggaaggtattaatagatgggagttggcaggtttttggcttcaaagcggggaacgtgaccaggggtcttccagaggagctgacccaagcagcttctgaggctcgatcctgcctgtggcctgcaggtgatgaccagtggctgggagacggtggacatgacgcttcggcggaacgggctcgggcagctgggcttccacgtgaagtacgacggcacggtggccgaggttgaggactatgggttcgcctggcaggccggcctccggcagggcagccgactagtggagatctgcaaggtggccgtggtcacactgacccacgaccagatgatcgacctgctgcgcacctctgtcactgtgaaggtggtcatcatcccgccttttgaggacggcactccccggaggtaagggcctccacctttcagccaggtggtgggtggcagctcccagatcgctggcatgaggcctccctggcactgtcacttgaggtcccaatagaggggggataggcaggcccttctaggcaggaatagtggcaacagtgacaggacggggagggcacatctacagagcgcttactgtatgccagttattggtttagcccttcatacgtgcatgatcgcatttaatctccacagttgccctgtgaggggagagcctcattcttcccatttcctacatgaagcacaggatgttaatagttgcttgcctgtgggccccccacacttcattcatttgttcaaaatgtgtttattgagcccctactgtgtgcaagctctgttcaaagtgaccacaacaaagtgcctgctcccttgcggtttgtgttctacagggaaagacaggccgtgaagaaataggtgtgtcataccggatcaggtagtactaagtctcagaaggaaattaaagcagggtaatgaaggggctgcagcacgatgggagagctgcttacaaggcgggcagagaaggctccacgaggctccacagggaggcagccatgtggttttctggccagcgggctccagacaggagctggccagggcacagcctccccagtgtacatgggtgatgtgttcctggagtacggggaggcccatgtggctggagcagagcgagcaggagtgagagctgagagcaaaggacagagaggtgaccaggcaggcggtgtgggcttcatgggttttattccatgcttgggttttattccatgctcagtgggaagctggtaggtgacttatttattttgttttgttttttcttttgttgtttttgttttttgtttttttagatggagtctcgctctgtcgcccaggctgaagtgcagtggcgtgatctcaactcactgcaacctccacctcccgggttcaagcgattctcctgcctcagcctcccgagtagctgggactacaggcacgtgccaccacgcccagctaatttttgtatttttagtagacacggggtttcaccatgttgtccaggatggtctcaatctcttgtcctcgtgatccacgtgcctcggcctcccaaagtgctggagttaacaggcgtgagccactgcgtccagccaacagcaatttcgtagtgtcaactatctagactgggttcacacctgtaatcgtaacactctgggaggctgaggtgggaagatcacttgaggccaggagttcaagaccagcctggccaacacagtgagaccccgtctctgcatctctgcatctctgcctaaaggagaaaaaaaaaacagtgcagttgtagccccagctattttcaggctgaggtgggaaaatcacttgagcctaggaagttgaggctgcagggagccatgattgtgccactgcactccagcctgggcaacagagggagacctcatctctttgttttttaaacagttgttcatcagaattctcctattggccgggtgtggtggctcacacctgtaacctcagcacttcgggaggccgaggcgggcggatcaccaggcgggagttcaagaccagcctgaaccaggctggagtccaagaccagcctgaccaatgtggagaaacactgtctctactaaaaatacaaaattagctgggcgtggtggcgcatgcctgtaatcccagctactcgggaggctgaggcaggagaattgcttgaacccgggaggcagaggttgcggtgagctgagatcgtgccattgcactccagcctgggcaacaagaatgaagctacgtctcaaaaaaaaaaaaaaagaaaaaaagaattctcctattgcatttgattcatgtatctcttgaggctctttttttttttgctttgagacagagtcttgctctgtcacccaggctggagtgcagtggcgcaatcttggctcactgcaacctccgcctcctgggttccagcgattctcctgtgtcagcctcctgagtagctgggattacaggcatgtagcaccacacctggctaaatttcatatttttagtagagctggggtttcaccatgttggccaggctggtcttgaactcctgacttcaggtgttccacccacctcagccacccaaagtgctgggattacagatgtgagccaccgcgcctggccttttccttgcagtttattttggaaagaaaccaggtcacctgtccttagagcttcccccttcctggctttagctggcggcctccccatggtgtcctttagcctattgctccaccactggtattttctgtaaactagagtcaaagatggaagcttgcttaggccccaatgggatgtctttcggccgcagcactcctaggtatgcatctgtgagaaggcactgcgtgcctggtctccccctgcaagtgacactaggggcaagcagaggcttcagacagcggcacctggccatcaccacatgtcccctccagtcctgtttcacagcccagcagccactgctaggccctgcctagatccatcatttcatgacggtttgcagacgagtgccatcttcattctgtcattccttcttcatatattggctggaatgcttctaaaaagagctttctttcagtaaccgtttagttaccctgaggtataatttgtacagagaagacaagataaatacagttttcagaataatgagttggtccctagcaacctccagaagtgaccaatgagagagacgcaccatgttctcagctctggaaacagtgcacagaggacagccaaggccttggcctcatggagtgaggccccaatgggtcaggggagacaaacagtaaacaagtaaatgaatgagatgattttatatcacagagtggggaggcaggagagcatagcaggagaggcaggctgtctaggtttgaatcccagctcttccccttgttacctttgaccctagggaagtggccttaccaccctgtgcccggtttcctcatttgtaaaacaaggacaataacgtcctttccacaagagcgtttgtgaagttgaaggagatccaacttgtaaagcacgtaggacaggccagacccagtgaatttgtgactgtggagtgctggtggctctcagcacttttggaggccgaggccagaagatcacttgagcccagcagttcgagaccagcctaggcaacatagcaagacctcgccactacaacaaattttttttttttttgagactgagtttcactcttgttgcccagactgcagtgcagtggcatgatcttagctcactgcaagctccgcctcctgtgttcaagcgattcttctgcctcatcctcccgagtagctgggactacaggcatgcaccaccacacccagctaatttttgtatttttagcagagacggggtttcaccttattggccaggctggtctcaaactcctgacctcatgtgatctgcccgcctcgacctcccagagtgctaggattacaggcatgagccactgcacccagcccaaatttttaaaaatcagctaggtgtgatggcacatgcatgtagtctcagctactcagggtgagataggaggttgagactgcagtgagctgtgatcacaccactgcactcaagctttctcaaaaaaaaaaaaaaaaaaaaaaaagccaggcttggtggctcatgcctgtaatcccagcactttcggaggccaaggcgggtggatcatgaggtcaggagtttgagaccagcctggccaatatggtgaaaccccgtctctactaaaaatacaaaaattagccgggcatggtagcgtgcgcctgtagttccagctattcaggaggctgaggcagaagaatcacttgaacccaggaggcagagtttgcagtgagccgattgcaccactgcactccagcctggatgacagagcgagactctgtttcaggaaaaaaaaaaaaaaaaaaaaaaaaaggcacgtgggacagtacttggcctataggaggcgctcgagagacactggcaccaagatactggatgtgaggactgtaaagggcacataacccacattggatagggtggtccgggaaggcccgaaggtgagggcaaaggcccttagcttggagacagaccagaaagaggacctgcatggctgcagcagattcagccaagaggagggcacaagatggggtgacgatgagtgccatattcacatatgaccttgctgggctcacaccagggctggtgtgatctctgctttgtagacgagaaaaccgaggcccagagtgaacaagtcactttgcagagttgtacagctagtaagcagcaaagcaaaattcaaatccaggtcggcctgtctccattatactctgcagcctctgaaagccatcacgagctattaatacacgggcatgcgagtgatgtccccaccctcaccttcctgagtcgtgcttgctctctctccacttggtgggggacagttctgggcaggcctaaaccctgaacctgagggtgtggccacccctacccacatcccagatggctcaacctcaggactccagtcatgccccgggtgtctccggttcccagcccttttctcctgccaccttcctaccctgcccggagccacagcccagccacacctgcttagatctctgcaggggcaagtcaaggccagataaccccacaggcaagtgccctggtggctacgctcctcgaggaaggacatgcacccctctccacacactcccacgggtgcacacgataagccagcttgcgcatcgcatgactctcaccccaaacatgcaggtagggacaaactgaaaggcaaagaaaagtctgcagttctccagctttggggagacagggccagggagagtgcaaccagacagaggagttcttctccctgcccttttcaggaggaagacattccctcctgttccctttataaggcagctgctgaaacaggatctcccgtttgcaggggtgggcgtgggtcaggacttgggtggtttttgttgttcttcaaatgcagaggtgtgtagctgacctcatttgcagagctgatgacccaggctctgggctttctccagcctgttgatgcaaccctggctcaaatgtctgttgtagtgagctctgaggcgagcagtgaggacgggatagaagtgccctcgctgccaccagccaggccgcatggcttgcacgctgaccccatgctctcagacaccgaggagaatgcatggggtcttcctcctacccccaggccacaaggctggagttttgtttgggtttttttgtttgtttgttttagttttgtttttcttcttttttcagacgaagtttcactctctgtgcctaggctggagtgcagtggtgtgagatcacgccactgcattccagcctgggcaagagagtgagactgtctcaaaaaaaaaaaaaaaaaaaaaaagaagaatgcgtaagaaagtgggagcagtggttgcttctggtagttgaaactggaggatgggattgggagacagggatgcgtgttatatcattttaatccttaaaaaaaattcaagggccagacgcagtggctcacacctataatcccagcactttgggaggccgagggaggcggatcacctgagatcaggagttcaagaccagcctagacaacatggtgaaacccggtgtctactaaaaatacaaaatgtagccgggcatggtggcaggcgcctgtaatcccagctactcaagaggctgaggcaggagaatcacttgaacccgggaggtggagattgcagtgagccaagactgcgtcactacacaccaacaagggtgacacagcaagactccgtctcaaaaaaaaatttttttaatcaataaatgaagcaggccttctcaaatgttattgtgtatcagcatcatcacaggcagctcagtcaaatgcagatccttgggccctgcctcaggggattctgatgcgtgtaatctgggatggggcccaggaatcttcattatttgctgagctcctgataatttcgatgatgatcattttcagatcactggggaaggcgagagccgggaggagctggggcagaatcttttccagagccccaaggtggtttggttggatttcagaaagtggaagtgaggcttttgcttctgtttgtgggaaaagcaggtaaactgtccttagaatcagctggaggaggcaactgcatcagctctgatttgttaagcagttgtcatgtgcagactctgctaacgctcagagaatgctcacagccagccccatattacagattaggaaactgaggctctgagaagagaattcctcacccacacccatgtaggtgataacggggctagaatctggatcagccatctggccccgcagccctggtctgtacctctccatgctgcatgctgccttcatttttgttgttgttgttgttgtttttgagatggagtctcactctgttgcccaggctggagtgcagtggcatgatctcagctcactgcaacctccgcttcccaggttcaagcgatcctcctgcctcaacccccctagtagctgagattataggcacgtgccaccatgcctggctaatttttgtatttttagtagagatggggtttcaccatgttggccaagctggtctttaactcctgacctcaggtgatccacccgcctcggcctcccaaagtgctgggattacagatgtgagccactgcacctggcccatatttttttttttttaggagatggggtctagaactcctgggttcaagtgatcctctcgtctgttcctcccaaatgctgggattataggtgtgagccactgcacccagcccatgctgccttcaaagtgattgattaatattttcctctttatattttaattattatttagttattatttttttggacacaggatcttgctgtgttgcccaggctggccttgaactcctgggatcaagtgatcctcccaactcagactgagttgtgtgagtagctgggactgcccagctatgtttttctctttgaggtcgtacccagggactcttagcccaagatgaagccatcagtacctaagggaaaaggccaggcatggtggctcatgtctgtaatcccaacactttgggaggccgaggtggatgcatcacttgaggtcaggagtttgagaccagcctggccaacatggtgaaaccccatctctactaaaaacacaaaaattagccaggcatggtggcaggcacctgtagtcccagctactcaggaggctgaggcatgagaattgcttgaacccaataggcgaaggttgcagtgagccaggatcacgccactgcactctagcctgggcaacagagccagactctgtctcaaataaaaaaaaaaaataataaagtaactaaaggaaaagtcaaggacataagaaatctacccactggctcccaaaccactctacggtggggccattgtccatggtggttaaagttgtgggctttggagtcaacgtgctaaatatttaaatccaacttctacttcttactggctgtttcaccttggatgggttatttaacttctctgtgcctcggtttacttgtctttaaaaggtgatgtactgatcaggactctgcgtaccagcaacagaacagactgaaacatggcgccgcaaaagagagtcttcactggctcacgtagccgacaagactaggagatgggacagcatttaggcatagccatatccagggactcagacaccctcaccaggagtctctgtcccttgtttacctttccatgtttgctgtcattctcagtcagtctcttgcctccccctcccacagggggttttcgaaacagttccagaataggacgtggtgcctcatgcctgtaatcctagcactttgggaggccaaggtgggcggatcacctgaggtcaggagttcgagaccagcctggccaacatgatgaaaccccatctctactaaaaatacaaaagttagccaggcatggtggcacatgcctgtaatcccagctactcgggaggctgaggcaggagaatcgcttgaacctgggaggcagaggttgcagtgagccgagatcgcaccactgcactccagcctgggtgacagaacgagactctatctcaaaaaaaaaaaaaaaaaactgagtgtggtggctcacgcctgtaatcccaacactttgggaggccgaggaggacagattacttgaggtcaggcattcaagaccagcctgggcaacatggtgaaatgccatctctactaaaaatacaaaaattagctaggtgtggtggcacacacctgtagtcctagctactcaggaggctaaggcgcgagaatcgctgaaacctgggaggtggaggttgcagtgagccgagatctcaccattgcactccagcctgggtgacagagcaagactccatctcaaaaaaaacaaacaactgatgctcgttatctctcgttggccctgcttagagcacatgacaattctgtgctagtcatcgtgtcagggtgggtgcttggagaaagcttctaattggtcaggcctgggtcacatgctaatacctggagccaggaagtggggtcagccccacccagagcccatattaacaaagacctgttatcaggagagggggtgtggggagagacaccaggcaggcaggaatggcaggtgtgcactgcctggagacagtgatagtacctttccccacctctgcccgggcctggcatgtctacaggctctgatagacgttcatattgttattgttcctcacctggtgcctggtgagacattggcagctgccagtccaaagggacagccagaagacactgccaagtgtcagttccagccatggcgctaccgaggggtgcggtgtgtcgggccctgggtgccagagcgcatccacctctgtcttagtctgttttgtgctgctatgacagaatatatgagatcggataatggataaagaacagacatacatttctcacagttgtgggggctgcaggttcaagatccaggcactggcaggatagggcctggtctttctacttccatgatggggccttgaatgctgtgacctctggaggacaggaacgccacgtccaaatacagcagaagagaagaagagagagagtccactcccgcaagccctttctatagtggcattcatccattcatgagggctctgccctaagctcctcccactagtccccacctcccaacagtggcattgggggttaagtttccaacacgtgacttttgggggaacacacatccagaccatagcagcctctgaaccaccatatccaccagatcttttgctgggtggccatgaacggggtggctccagggaattcaggagacactcagaggatcagctcgatgggggtatgggcacttccaggctgaaggctcctctgagctcagctctcagctgccaggaggtggatttcatgagcatggctcggggacccctcccatgcagggctgcagtggcagtggagaatgccagcccagccggcggatctccccgcctcaagccaggagcaccatggtgcatgtgccagcctggtctagggggagtcacaggtctctctgcatctatttcaaggttgtagatttcatggcttttttttttttttttaaccaccccacaaagtaggtcacctgctcctcttccagctgcctttaagattctttggaacaaggcagttactgtcctttgattctgaggacatccgcctttctggccctgagtaccgctaaggggggccaggcaggtctgtcgaggacactggcggcctggcagccgtgtggcctgggtcaggtagaagcgaggggcgggaacagagaattcgagtgggaggagggaagaggagatgaggtggaaagggccaggcagtcggagtccctgtgttgggtcccgtcctggttgaagactctgagctggtaagtttcagaccattttaaggagtattcactcgacttttaaaataggccatccccagccgggcgcggtggctcactcctataatcccagcattttgggaggctgaggcgggtggataacctgaggtcaggagttcgagaccagcctggccaacatggtgaaactctttctctactaaaaatacaaaacttagccgggcgtagtggcgcttgcctgtagtcccagctactcaggaggctgaggcacgagaatcgcttgaacccaggaggcagaggttgcagtgagccaacatcatgccgctgtactccagcctgggcgacaaagcaagactctgtctcaaaaaaaaaaaaaaaaaaaaaaaaagccatcccggtttatattgggccaggaaaacccagcctagacagcaggcccacgtgttggtgggctggggcctttctgagtaatgcagtttttctccccaggggttggccggagacctacgacatgaatacctcggagcccaagacggagcaggaaagcatcactcctgggggccggcccccctaccgcagcaatgctccctggcagtggagcgggcccgcatcccataactctctaccagcctccaagtgggccactccaaccactcccggccatgcccagtccctgagccggcccctgaagcagacccccatagtccccttccgggagtcccagccactgcacagcaagaggtaagcacctgctggggggaccaatacttcccaacccccaccagcccacacccatcctccgcccctccctctcctcactatttcctccatcctcttcctcgcctcaagctttcgaccttccttcttatccttatgtctcccttgttcctccctccctccttcgtttcagctttcaccgttggcctcttgtctggggacccagtgctggggagctctgggttagaaatccattatactaagtagacgactgaagctctgctttttaggctgggcacggtggctcacgcctgtaatcccaacattttgggaggtcaaggcaggagcattgcttgaggccaggagttagagagcttgggcaacatagcagaaccctggctctataaaaaacatttattaaaaattagccaggtgtgatgcacacctgtggtcccagctgcccaagaggctgaggtgggaggatggcttgagcccagaagttggaggctgcagtgagctgtgattgcaccactgcactccagactgagcaataccttatctctgaaaaataaaataaaataaaactgttatttttaaggtgaagggactgataagcacaaaatttaggacagtgacttcttcctggaggaggcagggaaatgggaagtggggaagcccacaggtagatgttagcaccaccgttctagtcctggggttggctggtagcttcagggagtttgttttatgatgatgacaaatataacttaacagatactcttttgaagatattatatattaaaagataaaaagaaaattttccaaaaaatgaaggaatccaacttgcagagggacatcttgtccccagggggcagaggcgagaatggtcttgagcagcctgcagaagctgtgagttgcgggcagccgcagtggatccgggaagagggggcccaggagcatcccagcttctctcgccctgtgctcagcatcctccccttcatcctgagcagtgaatagcagaagggatgtggctgggcgggggaaagttcggttggtctgtctgtctgtccgtctgtccatccatctgtctgtccgtccatcctcccagggcaggggtaccctcctactcaccctctgcctccttcctcccctgtctccttctaggcctgtcagcttcccagaaaccccttacacagtatcaccagcaggggccgacagagtccctccctaccgacagccttctgggagcttctccacccccggttcggccacctacgtgagatacaagccatccccagaaaggtcagcctccctcaattcttttcatgttaagggatctgatgaaagctgtgcctccttcttccccagcaaatgcacacccccacaattctagttgccattttatggtgtttctggacccctgaaggtcctcagaggagccccatggggtggttatgtctcaagttttggagcaaaactgggccgggctgggcaggacccatcgttggctttccttgcagcagaattttgattgctgttctcttgacacctgtcaagcaagagcatccactatccagcacggccatgcatctaactctctccagccctaagcccctaggaccaggctgccagcattacccagttttcgagatctttcaggattcagttctgcccacttgcgtccatctgcaacctggcagcctgagagatctccccaaaccctccatggctccccaccagcctgagagatctccccaaaccctccatggctccccagtgccctcaggataaacttggcattcaaggcccttcaggctctggctccggctgagcttattccccagctgccttcagccctcgtgccctctgttcttcctctgcccccaggtccctgtctcaggggcagccacatcaatcctagtccttgggcctgagctgtggccctcatcctgtgaatgtccccttcctcctcctccttgcagtggtcctcctcctgagcatctctgtcacccaccctctcctcctttccctgttctcttgcccaggccaccacagtgggcttccagccttcatctcacctcccctggtctaccctccactcaacactcaacagccagagggatctttctgtgtcttttttttttttttttttttttgagaccactctgtcgccagactggagtgcagtggcgcaatctcagctcactgcaacctccacctcccgggttcaagtgattctcctgcctcagcctcccaagtagctgggactacaggctctcgccaccacgcccagctaatttttgtatttttagtagagacggattttcaccatgctggccagactggtctcaaactcctggcctcaagcgatccgcctgcctcagcttcccaaagtgctgggattacaagtgtgagcccgtgcacctggccagatctttctatacctgaacatgcctgtcccctgctccaaaccctcccaccactcccagagccctcaggacacagctttggcccctccctgtggccaccagggcccctgcgagtctcgtgcagtgccacactttagccacactggccactcccagcttcctagggggactgtctgtatttcagagccttgatggtgttccttccttggcctgaatatgcttcacactcctcgcccacactccccccatcctaccaactcaagcttctgtgcccctctccagaacccttctctggagctccctcttgaggcaaggcactgccccccaattcctgtgtatttcctgactgtggccttgagcactcttcatccttattagccagctaagagtgtgtgtgcttgcgcacgtgcatgtatgtgcacctgtaagagagcgagagagagacagagagggtaagcgtgctcttcaagacctcccatcacatagtacacagtccgacacatggctgatctttggtatatattggatgaaaggatggagtgagtgggtttgttaaaatgaaaccacctgccttaagaccagggatcaggccaccaaaccagtggttctcaatctttagcaggcattggaatcacccagaggaggacttgttaaaatacagattattgggcctgagccccaaatttctgacctggtaggttcggggtgctgcaccagggaccattctctgagagtcaccacagtcatccattgttagattctaagcctcttgttcaattggagaaacacgcccactgtttcttcttctagtagccaccattcagctttcattcagcaaagggtctcaagagctttctggcgtgccaggaggagtatttgagatactcaattacgagggggttctgtagtcagcccttgctgactgtgatggagaggatcgtaaaaaccatgtgcactctgatgagcactctaatagaggaagagggaacacagcccagcactggaggtctagactggctgcctggaggaggtgacatctgaacagaagtttgagggactaataggagtctgcgacagagaggagagaaaaagtcattccaaacagagtaaaggccacagatatgaacaagcaggatgctgtgaaacacaggagaatcagagaggaatcgggtgtgtgcgggacatggggtgtgggggcacccaggtgacagcaggggctgaggttggaaatggcagtcagagtgactcaccagtaacaaaggtggtggcagtggtgttaccgaaagctcttgggaactgttgttgttgttgttgttttctcctaaagtcttggtatctgcctttattattttaactttttattttgtaataattactgagtcacaggaagttgccaaaaaaaacatacaggtggccgggcacagtggttcacgcctgtaatccctgcactttgggaggccgagatcggtggatcatctgaggtcaggagttcgagaccagcctggccaacatgatgaaaccccgtctctactgaaaatacaaaaaattagctgggtgtggtggcacgcgcctgtaatcccagctactcaggaggctgaagcgagagaatcgtttgaacctggtaggtgcaggttgcagtgagccaagactgtggcactgcactccagcctgggcaacaggagcaaaaactccgtctcaaaaaaaaaaaaaaaaaaaagaatacagggaggtcttgtgaacctgaacccttcacgcagcctcccctattgttaacatcttgtatggttataacgcaatatcaaagcaagaggttgacatgggtacaggcctacagcttattcaaaattcaccagttatacatgcactcatttgtgtgtgtgtgtctgtagctctgtgcaattttatcacatgtgaagtgttgtgtaaccatcacgaggtgcctcatgctacccttttatagccacacccatctcttccccctgtgcctaacccctggcaaccattcaccattcatctgttctgaggctcttttttttttttggagacaaagtctcactctgtcagccaggctggagtgcaatggcacgatcatatagctcactgaagcctcactcttctgggcccaagcagtcctcccatctcagctttgcaattagctaggactgcaggcatgcaccgccacacccagccaatttttcttttctttcatagagacaaggtctcgctgtgttgctgagactgatcttgaagcccttgcctcaagccatcctcccacctggacatcccaaagtgctaggattacaggcgtgagccaccacacccaacctgtcttttaattattgttatttcatgatgaatgttagataaaaagaatcagatgtacgtatgcttcagaggttgtctttttcactcagcagaatgtccttaaggttcatccacgttgtcgcgagtctctagttcactcattatgctgtttattccgtggtctagatataccacagtttaaccactcacccatcaaaagacatttgggggagtgcatattcagggcactttgaatctatgctgctgggttgaaataaagttttttaaaatattaaaaatatattttaaaaagatttaaaaagacatttgggtagtttccgagttttggctattataaatattcatgcggtgaacatgtacattcaggcatacaggtttctgcatgaaaataagttttcatttctctgggataaatgcccaggagtacaattgcttaccgtatggtaagtccatttttagtttgaaaaggaactgccaaactgttttccagagtgtctgtatcattttacattcccaccagcagagcgtgagtgatccgggtctccacatcctcaccatttggcgttgtcactgtttttcattttagctacttttgataggtgtgcagtgatatctcactgtgattttaatttgcatgttcctaatggctaaggatattgaacaccttttcatgtcttatttgccacccctgtatcctcttcagtgaagtgcctgtgcgtgtcttttgtgcgtcttctaattgggtgtgatggtgttctgtgtctaagagttctttggacattctaaatacaagtcctttgtcagatatgcgatttgcaaatatttcctcccagcctttagtttgtcttttttacagggtctttcacagaacaaaagttttttattttattttttatttttatttatttatttattttgagacggagtcttgctctgttgcccaagccggagtgcagtggtgtcatctcggctccctgcaacttctgcctcccaggttcaagcgattctcatgcctcaacctcccatgaagctgggattacaggtacgcacaaccctcccagctaatttttgtatttttagtagagacagggtttcaccatgttggccaggctggtttcaaactcctgggctaaatcaagtgactctcctgccttggcctcccaaagtgctgggattataggcatgagccaccacacccagcctaagttttttattctgataaagcccaaattatcttttttttattattattttatggatcaggtttttggtgttgtctaagaactctgcttagtgctgggtcctgaagattttctcgtttttttttctggaagttttactcttttacatttaagtccatgatccattttgagatttgtttgttttaatttttgtgtaaggtgagaggtttaggttgaggttcctttattgcctatggttgtctgatttactccagtgctatttattgaaaaggttacccccactccactgtactgcttttgttccttaaggcaaaaatgggggagtgcagaattaattggatatccttgtgtggatctgtttctgggttccattgatctatacgtatgatctcagtgagtcctcccagcaactccttgaggtgggtagtttaattgccctcattttacagagggaaactacagctcagtgaggtgaatttgcttggctgaggtcactctgccaggacgtaacagagccaagatgagaacccgggactatggttccagagggctgaccctgacgtagaactttgggaggctgaggtgggaggattgcttgggcccgggctgtcaaggcttcagtgagccaggtgtgtgacattgcactccagcctgggtgacagagtgagactctgtcccaaaataattaattaattaagagggaaggggccgggctcggtggctcaagcctgtaatcccagcactttgggaggctgaggcgggtggatcatgaggtcaggagttcgagaccagcctggccaagatggtgaaaccccttctctactaaaaatacaaaagttagctgggtacggtggcaggcgcctgtagtcccagctactcgggaggctgaggcaggagaatcacttgaacccgggaggcggaggttgcagtgagctgagatcgcgccactgcactctagcctgggtgacagaacaagactccatctcaaaaaaaaaaaaaaagttgggggaaggaactggatcacttgcccacccctcaacccctggcaaggtcacattgcacctctgtggctgtgttaactgtgaggatttactcaagtcacgagacagagggctggctgccagagtggaatctgggcaagcaggaacggaggtgatggctgctggggtggcagccaacaaggctacatcatctgaccgtcattttgcccaggcatcctgtcattcacctgtctattgtttcatcggttgatgtgggagattgacagagcgggctggagctctctgcccggcgaggctcctgcccacagtcctgtctgttttggtgctttcctctgtggccaagagggaagctcaagccagcgtcccgtagcccaaccctgctccccgtaaggttcctccccagagtcagtacctccagcttctgcctggagacatctgaaaccatagctagtcagctcatcccaaaacaccaaaccctttataaagtgagttatcttccaagaagagataattactttaaaattactcagatgaggttaaagacagcaatttgatcttctcttctgccggggatgtttccccagagctgtgtgtgatgagatgctggaatgtcccgatttctaatcagtttgaccaaaattggacagtgatagacatggtctcaaatgggatatattcagcatcccaatgaatggtcaacataggtcagtttgcattgggataataaaaagtcttgttagttgggtggggcacagtggctcacacctgtaatcccagcactttgggaggccgaggtgggcaggtgcaagcagatcacttgaggccaggagtttgagaccagcctggccaatatggtgaaacctcatctctaataaaaatacaaaaattagcttggcaccttggcgtgtgcctgtcttcccttgggaggctgaggaaagagaatatcgcttgaaccctggaagtggaagttcgcgtcactgctgcactccagcctaagcaatagggcaagactccgtctcaaaaaaacaaaaaaagtcttgttaacaagagaagtacatggttggataaagtacgggttgtctgattggggaaagtagctgagagatgaaacaaggtaaaatatgcccaactaaagaggagggtctatgtattacgattaggtttagctgcatagtatacaaaatagtggttctgacaagattgtttctttccccacattgacgggaaaccaggccccccctccttgatgtattgctgtccttggccttttgcctcctggttcaaagtggctgttcaagctgtagccttgaggaggtggtgaggcaaaggcatccacagcacactcatgaggaagcttcgaggctggaagttatgtgtggcacctccacttttatctcattggccagagctgcaagggatcctgggacatgtagtctggtgatccagtctcattgctgccccagatacagttgggattctgttaccaaggaggaaggagaggctagtcatggggagcagcctgcagcatccgccactcagactttccgccctccccgggctcatcctagccatttttcctgagtgctgaggatttcacagcgactttttgggaaaactgagtaagtgcatcaacactccgaactccagcaaggatggagccacattttaccaggcagctagccaggtgtgaagtcagctagtaagatgaagattgcttatagtcaaagttgcttttgtaaaatccctttgattgctggaaactgggccctcagacattgagaaaagtaagaattcacgtttcgtacttcctgtgtttgggccctgttttcctttcctggaggtgtcagtggtcaaggtctggttgagggcagggaggatggtgtgttttttcctggcaagtgagtggagttgagttttcagagagtgcagtgccccttgaaacacctctctactgtgctcagggcattgaagccaggggattagggcagggtccctgtagagacagtcctggctttgagctggcagggtgaccctggataagtcagttacttcctctttggcatcttgggggatcctagtttatcacctcacctccccctaccagatcctcccaagttgaaaatacagatgccaggagccaaccagggaattgcaatatcaacactttttttttttttttttttttgaaatggagtcttgttctgttgtccaggctggagcgcagtggcacagtcttggctcactgcaaccgcaatctccgcctcccaggttcaattgattctcctgcctcagcctcccaagtagctgggatgtcacaggcacacaccaccacacctggctaatttttatatttttagtagagatggggttttgccatgttggccaggctggtctcgaactcctgagctctagtgatctgcctgcctcggcctcccaaagtgctgggattacaggcgtgagccaccacacctggctaatatcaacattattaatggaggctcagtaactcccccagagcacagggcctgtgtcagtgaggtgcttctggctgaagtaaccaaaatttggctcaaacattgtaggaatttgttatctcacagaaaaggaagctcaggagcagggcaggttccagggagggtgaacccagcatcttgaccacattatcaagggccagattccttctgcctcctctcttccaccatcagagtgggtcttacctgcagcctggtagcaacagggcagcagcagcttatgatgttaaatctggacccagcagcatctggagggcaaagagaggccatcttttcttgtcatccctcttaggagcaaggagatttcccagaagcctctgggcagacttaccccatttcagtcagacggtgctgggtaacagacacctgaaagtctccgtggcttaaatcagcaacgtttatttctcagcccctccgcagttccactgctggttggcagggacctctcaggacccaggctacccaggcagccagcaactccaagtcacttccctgacagctcagctatgagcgctggtcacatgactccattcagccagtctcaagggacctggaagtgtgtcctgccacctgcttggaagtggagaactggaatgttttgtgggcgtcttaataactcacctcccttcgtgtctcatcagccaaaattttgtcacaggcctgtctctgaaccaacctcagacagggagaagaccttctaccacaaccggctgtgatccaaggaggactggacgttaggaagtgtctacaagattcaccccatggttgtagacagggccactggggccgggcatggtggctcacatctgtagtcccagcgctttgggaagctgaagtaggcaaatcgcttgggcccaggagttcaagaccagcctgggcaacatggtgaaacccatctctacaaaaaaatactaaaaattagccgggcgtgtaacatgcagctatagtaccagctactcaggaggctgaagtgggaggatcgcttgagccgggaggcggaggttgcagtgagctgagattgtgccactgcactccagcctggttgacagagcaagaccccatctcaaaaaaaaaaaaaaaaaaaaaatagagaatgccactgggacaggagggcacagtgagagccttctaccaccacctcccttaaatcctagccttgcatgtgggtgtgcgaagctggcctccaggaggacctctgtctaggggataactttattccatccactccccaactctatgaggtagaaaatgttacctcgtgagctgggcgtggtagaacacacagagttctagcccatcagccaggtgtcccaagtcaccatgtgtcaggaatcaaacccctgcctaaacactggacatgacggggcatccttcagtcctgagaagaaggacctactgttatcgcctcttgacagctaaggaaactgaggctgtgggctaggaagtggctgcatctgtctaggcaagaggccatggtgagctttgaagccccagttgcccaactcagggcctgctgcacccatgaatgcttcccaacctgctgtctccatcagagcaaggcagcccgagagaggcctggggcagtagctgctggggacattcaccccatgtcacagccagaaaacaggacccctgagaggagcccaggggtagggctgtcggcccaagcggcctctgccccctccttcccttaggaacccgccttgccccgccgccaccagctccctggcaggcttcccaggcgagactctcatcccggacccgcagctaatagcacgtttccaggcttactcatccagccttcctaaccgctttctctcatccacagcggagcctcccgtgtgtctaaaacccactggcgagcaaggctcaggctcaggctcaggtggttttcgacataggctgatctttaaccctgggcacgttcttctcatcccctgcaggtacacggctgccccacaccccctgctatctcttgatccccacttcagccacgatgggacgtccagcggcgactcctcttccggcggcctgaccagccaggagagcaccatggaacgccagaagccaggtagggcccccaccagctgctgcgcccacccgcctgcctcactccgcaggacctcttacttagagcttgacaggcaacactccccctcttgtgagtgacggataaaacacaaaagaaagctgtaagcgccacatgtaagactagagagggcacctaggagagcagcggaaccagcaagcgagatccttatccgtccagacagggcatcggcaggtggcgtctgctcccgctgataaggccagagccggcgtgcagctgtgtgacatggagctgggagccaccagggaaggtagctgaaaaagattaagcattgagctctcaggagcaggactggctgcgtcccgtggcttttcattacataaaccctcctgtgttgttttcaacttttatggacatacggcacatgttaagagcccacatggccaggcggggtggctcacgcctataatcccagcactttgagaggccgaggtgggaggattacctgaggtcaggagtttaagaccagcctggccaacatgtggaaaccccatctctactaaaaatacaaaaattagccgggcatggtggcatgtacctgtaatcccggctacttgggaggctgaggcaggagaatcacttgaacctgggaggcagaggttgcagtgagctgaaatcgtgccactgcactccagcctgggtgacagagcaagattctgtctcaaaaaaaaaaaaaaaagaggccaggccaaggcgggcggataataatttgaggtcaggaattcaagaccagcctggccaacatggggaaaccctgtctctactaaaaatacaaaaattagccaggcgtggtggtacatgcctgtaatctcagctactcaggaggctgaggcaggagaattgcttgaacctgggaggcagaggttgcagtgagccgagatcgagtcactgcactccagcctgagcgacagagcaagactctgtctcagaaaaaaaaagaaaagagcctacatgatgaagacacagcctgataacctatcgcagagtggacacacccaggcaggaaatataacatggctagcctctccaaacccccattcccctcccagttagtacccccaaaggaaccctgtcctacttctcagcctgagctttgcctggttttgaatttcatagaatacagaatcacactgtgtctattttgtgtatgtgtgtctggtttctgtcactcagtgttacatttgtgacagccagccagtgaatgtacatggtatcgcagtatctgagtggtatcccccgttgtatgaataagccacaacttattgccacatcttggtgttgatagacatttgggttgtttgcagttgggctgcctagagcagtgttgctaggaacattcttgtgcctgtcttttgatgaacataggttcacatttctgtagggtatacacctaggagtgaaatttctaggtcatatttttaagttgattttattttatttatttatttatttattttttaaacggagtttcgctcttgtcacccaggctggagtgcaatggcacaatctcggctcaccgcaacctccaactcctgggttcaaacaattctcctgcttcagcctctcaagtagctgagactacagacatgcgccaccacacctggctaatttttgtatttttagtagagacggggtttcaccatcttggccaggctcgtctcgaactcctgaccttgtgatccacccgcctcagcctcccaaagtgatgggattacaggcgtgagccaccgcacccagctattttattttattattcattttttttttttttttgagacagagtcttactctgttgcccaagctggagtgcagtggcgtaatctcagctcgctgcaacctccgcctcccaggctcaagcgattctcctgcctcagcctcccaagtacctgggaccataggcatgagccaccactcctggctaattttgtatttttaatagagacagggtttcaacatgttgccaaggctggtcttgaactcctgacctcaagtgatccacccgcttcggcttcccaaagtgctgagattacaggtgtgagccaccacacagggctagtatgtttaactttataagaaggtgccaaactgtttcccaaaatgacaaagcatcttatactctgtctatcaacatgtgagagttctagttgctgcatgccctcaccagcctctgtgtttcattcattccggtgggcaggtggtgctaccacattatggttttattttatttattattttttaaaaacattttttacagagacaacgtcttgccatgttgcccaggctggtctcaaactcctgggctcaggtgatcctcctacctcagcctcccaaagtgctgggattacaggcgcgagccaccgcacccggctggctttgtaatttgaattctttatgtctgtaatttgcatttttctgaagactgctaagatttgagcatcttctcaatgtgtcttccccattattaatcatgttgtgaactactcagatgaatattttaaacataattccatagaacaaacttgtagcccctttgaagtctgagaaccagcagatgaatgggcgagatggattcagaaggaagcaaacaaatgagcaatgttagaaagcagtgacgtcagagtgggaggggtggagatgtcctcttagggagtgtctgagaatttccaggcagctgggagagctgaccccatcagcacaccagctcccccagatgctgtggggtacggaagaggctgcatgccccaagattcgtggcctggagaattcctcaatatctcagcccatggttctcttaaaccagagacagtgtcacgcctataatcccagcattttgggaggccgaggcaggccgatctcctgagatcaggagttcgagaccagcctggccaacttggcgaaaccccttctctactaaaaatacaaaaattaaccaggcgtgatggtgcatgcctataatcccagctactcaggaggctgaggcaggagaatcgcttgaacacgggaggcagaagttgcagtaagctgagatcgcgccgttccactccagcctgggtaacgagagagaaactctgtctcaaaaaaaacaaaaaccagagacagtggttgggcttcagggaagcaggtcgaactgctggggcctcagcctctttgctgtctccagggtgtgcgtggtttgctcctgtcctcagcacatttgatcatgtcactgcctgcaattctgtcatctttgctccaagacagatagatttggatcccttttttcctttttcctcagcaagttcagaaaaagagaaaagtgttgcttggctatttcattacacaccaaagtacaaaatggggaggaagtgtttcctgcatacaccatgggccccaaaaaagaaactcaccattgcccttcccttccctcttctgtcccctggagcttggctcccctctcacttccttgggaccttgttatagttgactcctaaaattgccgccgccatacacacacgcccacatggatcaggggaatctgtgtttagaaatcatcatgaggctgggcgcagtggctcacgcctgtaatcccagcactttgggaggccgaggcgggtggatcacttgaggtcaggagctcaagaccagcctgaccaacatgatgaaaccctatctgtaccaaaaatataaaaattagctgggtgtggtggcatgcacctgtaatcccagctactcaggaggctgaggcaggagaatcgcttgaacccgggagacagaggttgcagtgagctgagatcacgcattgcactcctgcctcggagacagagtgagactccatctaaaaaataaaaaaagaaatcattgtgaggtctacaatgtattcaagactcagaaaaaaggccagggacagtggctcacacctataattctagcactgtgggaggctgaggtgggaggattgcttgaggctaggagttcgaaaccagcgtgggcaacctagtgggactctgcctctacaaaaaataaaaaaatatagctaggtgtggcagtgcgcacctatggtcccagctgctcaagaggctgaggtggaaggatggcttgagcccgagagtttgaggctacagcaagccatgatccactacactccagcctggccgacagagcaacacctgtctcaataaaataaaaaaataaaaaaaagttggttcactaaagatggcaaggatcaggcttcgcagcagatgtgggggtttgcccagccccgatggagcgagccatcctaataacagctgtacagtttcgtggattgtccagtgtgcacactgcacatgccttcatgtttagtcgtctcaggaacacaacagggtgggcactgcgactgcccccggttagagaggaggacgatgaggcacagaaaggttgtcacttgtcccaggtcactgctggtgagcagcgtaatcaggatatgaacggagccctgttgggtcccagaacccctccataagctccacccacaacccctcacccacagagtgtgagcgtttcccaggcctcagagcacccaggttgggagggttgcctccatggtcaccggctgcccagagactgtgcctggcccagggttttagcatgctctcacgctgtcccctgcccagcatgtcaagtttggggtaggaaggccagcaggtcaccgagggctgatccagagaactaggggacaggatcagggcctgctgagggcagagctggggcaggagaatgcaggggcagccaggatggggaggaagctgccctttcacctgtgcatgcattcaactgatgatgccaccaggctgggcgccagggataccgggtgagccaggcaggcatgttttctgccttattggagctgaaagtctggtgggagaattggacaattacagggacacgatgatgataaaacattaacagtaatgccgagtatgaagtggaaactaggctgggcacggtgtctcatgtctgtaatcccagcactttcggaggccaaggcaggcggatcacttgaggtcaggagttcgagagcagcctggccaacatggtgaaaccccatctctactaaaaattagccaggcatagtggcgggcacctgtaatcccagcggctcgggaggctgaggcaggagaatcacttgaacccgggaggtggaggttgcagtgagccgagattgtgccactgcactccagcctgggcaacagagcagtctctgtctcaaaagaaaaaaaaagtggaaactgtcacagtgtgcagaaggagatttacagggtttggggggcatctctgagcaaatcacatttcaggtgaggttggaataatgcaaagaagtcagtggggatgagaacattccagggaaagtgaacagctagttggagaccctgaggtggtggcgatgaggcccatgtggtgagaactgagatcagggaggggacgggcagagtatgtggagcctcttgggccacggggaggcggttgtcctgtactgagagtgggacaggagccgcaggtctcagtcttctgtgcagaggaggggcaggatctgactcgggtgttcccaggagcccctggctacagattactgtcaggtggggtgggagcaggaccaggtggggacagaggtaggcggagatgcacgattctggatatagtattttaaaggcagcgttaaccaaatttcttgatgatgcctagttgtgggcatgagagaagtcaaggatgccacagggggtttggccacagcagctgaaaggagaagccatgaactgagcaggaaaactgtgggagatgcaggtttgggggaaggtacagcccttggcttggccttggccatgttcagtgagaggtgcctgatagatacccaagtggaggtgctgcagggcagccgagttcaagtgtcaagtcaggggcagaggtcagcccagaggtagagcactggagttgtccgttgtctgtggtttttgaggccggatgtgactgccatgggcttcgctctgtagaaatgtggtctcccagagtgactgcccacctcccggggagccagcaccttctgggtgtataaaaatgccccaaagaggaaaaccatcaatggaggcagagcaggtggacaaagaggccagcctccccactttctcgcatccatggttccccagtgaaagccacacacgcggtgacaccctcaactgagactagaccacatccagccaggccattctctgcagtggccctgagtgccctgcctggtcacccgggccaccttccccagcaggaacatgggcccaagagtaccctgggcttgcaccggaggtggcagtgtgattgcaagctcggggtcccacaggcctggtgggcagttctgagttgggcgtatgcttggtgtgtggcctcagcagtgacctcctccccctcagcctcaggtcccactcctgtagtggacatcctaggtgtctctccttccagggcagtttgtggggggtccagtgagataatgccggccaagcccacggcccatcattaggagaacaagagctcctgcccatcgggcactcactctccaccactgccagcattgccgttgttggtgaagccaagggaggaggcagggcttgacagcacaggtgctaaactaggccaatccgagccacacgtcctgcctggccctttcccactgtgcgaccttggaccagctgcttaacctctccgagtcttgttccacatctatcggagatgctcctgatacccacttcacagtggtactgggaggacgcagcagggtaatgtatgcagagtgcttaccatagcgcctgacacagaacacacgcttaatgggaattatcattatgttaatgatcttgaataccatagtgatcaaaagtcagctttggggttaaatcaccggcgttcagctcctcagttagtgcatttgtaatttccatagataatatctaaatgccctccactggggttggtcactttttatgtatgtctttatttattttattttttatttatttttttgagacggagtattgctctgttgcccaggatggagtgtaatggcgcgatctcggctcactgcagcctccacctcccaggttcaagcaattctcctacctcagcctcccgagtagctgggactacaggcatgtgccatcacacccagctaatttttttgtatttttaggagagacagggtttcaccatgttggtcaggctggtcctgaactcctgacctcaaatgatccccccatcttggcctcccaaagtgctgggattacaggcatgagccaccgcacctggccaatttttttttaaggtcagcaagatacttggtccaggcatactgactaggctggagaggttaaaccagttgacatccagagcagctgctactcttttttttttttttgagacggagtctcgcttagtctccaggctggagtgcaggggtgcgatctcggctcactgcagcctcctcctcccaggtccaagcgattcttctgcctcagcctcccaagtagctgggactacaggcgtgcaccaccacacccagctattttttgtattttttttagtagagacggggtttcaccatgttggacaggatggtctcaactcttgacctcgtgctctgcccgcctcggcctcccaaagtgctgggattacaggcgtgagccaccgcaccaggcctgacatccacagcagccactactcttaaacccgcttcacctttggaccagcaattccaccagtagcactctctgtcccacacacaatcccacgcttgctcaaagtcgcatgtagagggaaggccactgtagagggaagactgttcaagataacctaaatatccatcagtaggaaactggcaggtcattgatgtacattcacttagtgcaatactattagggtaacatcacattcaattatgtgaagacctatggtgaagatataaagagaaaagcaagtatagacatattacaaagtgaaaaattaagttgtaggacagtgtttattattattccatttttgttttttaaaaaagttgtgggccgggcacggtggctcacatctgtaatcccagcactttgggaggctgagatgggtggatcacgaggtcaggagttcgagaccagcctggccaagatggtgaaaccccgtctctactaaaaatacaaaaattagccgggcgtggtggccagtgcctgtaatcccagctactcaggaggctgaggcaggagaatcacttgacctgggaggcagaggttgcagtgagctgagatcacaccactgcgctctagcctgggtgacagagcaagactccgtctcaaaaaaaaaaaaaaaaaaaaactatgtacatacaaccaacaaaggattgctaccttgcatatgtaaagaactctactaaccaataagataaaagatagtttgggccgggtgcggtagctcacacctgtaatcccagcactttgggaggccgaggcaggtggatcacgaggtcaggagttcgagaccagcctggccaatatggtgaaaccctgtctccactaaaaatacaaaacaattagctgggcatggtggtgccacacctgtaatcccagctgcttgagaggctgagacaggagaatcacttgaaccctgggcagtggagggtgcagtgagctgagatcataccactgcactccagcctgagcgacagagcgagaccccatctcaaaaaagacagtcaagctcatagataaatgggtaaaggaggctaggcatggtggctcacgcctatcatcccagcactttgggaagctgaggcaggaggatcacttgaggccaggagttcaagaccaccctggatgctgtagcaagacctcaaaaaaaaaaaaaaaattagccaagcatggtgatgcacacctgtagtcctagctacttgggaggctgaggcgggaggatggcttcaacccaggagttcaaggttacagtgagctatgatcattccattgcactttagcctgggtgacagggagagagggaaatgggatattgcacggcttcagtgaggccctcagaacggtgtctggcacatagtatgtgctgagatgtattctctgttactgagtgttgcactccaaggtgtaaattgatggggtcatgccgtgggtgagcagacagtctggcaaagggtccagattcttcaggccctggcctgagtcactcctaaccactggtgtgtctcctgttttcctacagagcctttgtggcatgtgcctgcccaggccaggctctcagccatagccggaagcagcgggaacaagcacccgtccaggcaggatgcagcaggcaaagattcccccaacaggcattccaaagtgagtctgggccccaccctgccctaccgggggagccaggcctgcctgggtgtggcctctgagcttcacacttgagcacatcctcaacctctgccaccttccactcagcagaggggttgaatacttggtctgagttggaaccaaccaggttcacattctggctccagccctcatcagccaggtcatctagggcaaatccctttacctcctcgagccgcagtttcctcattgttccatcagtcatggtaaatcagctgctgtaacagacagccccgaatctcagtgacttcatacagtggaagtggatttccctctcctgtaacagcgcagtgcaggtattcagtgagcatctacccgccattcacgtggtgattcagagcccaggctccctccctcttgtggctctgctgtccctcagaggttccaagccctctgctgggtccctgcgtctttccagcagtggaggtgagtgggagaaaagatcacatgggaggtgttttttagcccaggcctggaaatggcatgaatcgcttccattccatcacgtggccacacctagctgcaagggaggctgggaaatgtagtcttgcatggcccaggaaggctggggatgtagtcctgtgtgtccaggaggaggagatggtttgcaggggctcttggcaatctctttgtatccattcgttcagtgggtgtttgacaagcgcttacaacactccaggcattgggaccatgatgatgaagaggacagaccagccctgtcctcaggaagctgacttcccatttggggcagcaagcagtaagcagataaacagatctgttgtataagaaaaagtgcgggctgggcgcggtggctcacgcctataatcccagtgctttaggaggccaaggcggacggatcacctgcagtcaggagttcgagaccagcctgggcaacctagtaaaaccccgtctctactaaaaatacaaaaattagccaggcgtggtggcaggaacctataatcccagctccttgggaggctgaggcacaagaattgcttgaacccaggaggcagaggctgcagtaagccaagattgcaccactgcactccagcctgagcgacagagtgagactctatctcaaaaaaaaaaaaaaaaaaaaaacagtccaggggagagagtgacaagcactgcagctcaaggatgatgtggtcagagagggcctttgagggggtgacctttgagcggaaaccttgagtgaaggaagggggaggcccacgaagatctctcagggaagagtattgcaggcagagggagcagcaggcgcagaggccctgacggggagtgcccagtatgttccgagaatagcaagggggccaccatggccacagcaacgtgatcgggagggaggggagatgaagttggagaccgggacccaagcatcaaagccccatgggccatgctgggaactctcacttgtgcctggagtaagatggagccacaggtgggggtcatcatctaactcaggtgttctcagccttctgctggctgcgtgtggggaataaacagggggatgagggtgcagagagaccagggaggaggctgctgcactggccccagggggaggacaggacaggcatggacaggaccacgcggagccgtggagcaggaagtgacaggtcccggatctgtgttgaggacgcgggcagcagggtttgctagtgggctggacatgagtgagagcaaaagcggggtcaaggtgagtccacggctcttggcaggggcagctgaaagcatggccggcgtcattgagatgaggaagacgctgccgaactcagtcttagattcgctgagtctgagatgtgggaagcatgttctgtgcctgatgtcatttgttcctctgagcagccccatgaggcaggcttactatcaccctccattttacagatgtggaaactgaggctgagggaaggtaaatcacttgcccaaggtaacacggccagtagatgagaagccaggatttgaagctgtctggtcccagggttcaggcccaggcagagggaggacccggcaagggaagatgcgcccctgccctggagtctgggaatgacacgcttctcttgcctctcagggagaacctcaatactcaagtcattccagcagcaacaccctctccagcaacgcatccagcagccacagcgacgaccgctggttcgaccccctggaccccctggagccagagcaagaccccctctccaagggtggctctagtgacagcggcatcgacaccaccctctacacctccagccctagctgcatgtccctggccaaggctccacggcccgccaagccacacaagccccctggaagtatgggcctttgtggcgggggtcgcgaggccgctgggaggtcccaccacgcagacaggcggcgggaggtctcccctgcccccgcagttgccggccaaagcaagggctaccgaccgaagctgtactcctccggctccagcacccccacgggactggcggggggcagccgagacccaccgaggcagcccaggtaagctgttgcacctagtctgggttctaaccaccttccacttcgccagttctacttttacggtcctgatggtggggttctcctccccagaaacacactcacggatgaatgcgcctagtcattggtttgctgacagaattgaggagctcgtggatctctgccttattgcccatccatcagcattcagggaccccaggtggagggaaagaaacccctggccttctgtctctgttttcatctgtctctggttctctctgaccctctgtctcttttttctttgctctctgctgataccaaaagtttttatgctttctaaagggtcacagactgtatctgatagagtgtatttggctggaggcaataggaaacctgaccctctgtggcttaaacaaatagaggtgtaacaaacagtcccctaacatgaagtccagagaaggcagagccaggctagtgctgtggcttgtggagagcctcaaggattggcactctgtgtctccctgctcggcatctttaccatgctggctcatgtctcacttgccttgagatggagctgtgctgcctggtgagtggcagttggggacagagaagaggggaaagttggaagcctctgagcacctttcccttcctatggagaaagcaaacactttcccagaacccctttcagcagctggcatcacggggccatcccagctacaaggaggtctggaaagttgtagtttggtcttccaggctctaccgtatacggcgatggtccccacagaagccctcaaaggcttgttcagcccagctgctggcccccacccagagtttctgattcaataggtcggagcgggagacctgagaacgtgcattggtgtttttttgtttgttttttagacggagtttcgttctattcaccaggccggagtgcagtggtgcggtctcaggctcactgcaccctctacctcccaggttcaagtgattctcctgcctcggcctcccgagtagctgagattacaggtgcccaccaccatgcccaactaatttttgtatttttagtagagacagggtttcaccatgtcggccaggctggtctcaaactcctgacctaaagggatcctcccacctcagcctcccaaattgctgggatcacaggtgtgagccaccatgcccggctgagaatatgcattaagttctcagtaaatgctgatgctgctggtcccaggaccacactttgagagccactggtagagaggcagacgggagtaagagagaaagagtaggcattggctggaaacggtggctcatacctgtaatcccagcactttgggaggccaaggcgggtggatcatgaggtcaggagatccagactgtcctggccaacatggtgaaaccccgtctctacttaaatacaaaaaaaaattagccaggcatggtagtgggcgcctgtagtcccagctacttgggaggctgaggcaggagaatcgcttgaacccaggaggcagaggttgcagtgagccgagatcgtgccactgcactccacccaggcgacagagcaagactctgtctcaaaaaaaaaaaaaagaaaagaaaagaaaagcaggaattggcgagccagcagcctagagtcccgaccacacacactgacgttcggatggaggcaatgagccaccttccagaaaagggcacagagatggaaagagtattctacacagacacagagctcagcctcatccttggacccccttagggttctgtgaccccagcagggcttgctgtgctgtagtgtccagtgccagcccctgagtccacagccccacatcccttcctgaccatgcctggggtgggctagcctgagtccccgatagccatcagggctcagaacctggttggcgcagggatcttcctctcctgtggcgccctaaagccttttccagtcctcaaaccccagcctctctccacacaggacacccacactcaggcagccaactcagacttctgaccacagtccacagtagaattgtgtccatctatacagaaatatctatgttaaaaaaaaaaaaaggtggctttgagcagtggctcacgcctgtaatcccagcactttgggaggccaaggcaagcggatcacaaggtcaagagctcgagaccgtcctggccaacatggtgaaaccccatctctactgaaaatacaaaaattagctgggcgtggtggtgggcacctgtagtcccagatactcgggaggctgaggcaggagaatcgcttgaatctgggaggcagaggttgcagtgagccaagatcatgccactgcactccagcctggcaacagagcgagattccatctcaaaaaaaaaaaaaaaaaggtgaagcagtggtttccaaaataattcttaacctgtgtgtgatatactttgatccagtctactctatttaaaaacttttaatgctgatcaatccccactcagatgatttcatggcttacagtgttctctgacagatatttgaaaaccactgtgtttgagtgattgtagtgtcagcacttccccgggcacactgtgatccaagggtctccttgagtcaaagagccaggagaagggctgaaggaggaaagaggagacagacagagagagacactgtctgagtgttttagacctctcagttcatctccctagacaagtggctgtttgttttttagaaacagggtcctgctctattgcccaggctggggtgcagtagtacgaccatagctcacgatagcctcgaactcctcagctcaagtgttcctcccacctcagccccctaagtagctgagactacaggtgtgtgcccccatgcccagctaattttttaagtttgttagtagagaaggggtctcactgtgttgccaaggttggtctcgaactcctgggctcaagcgatgctcccatctcggcctctcaaaatgctgggattacaggcatgagctaccacacctggtgacgagtacctcttaatcttttgaacatgtggactcttttgaatggctctttcattcatttattcattcactccattcataagtatttcttagggatttgctcggtcccagacactgtgctgggagctgagagaaatcaggagcacatttggatgaggcctccccaccgcccactgtcaaatgagggaagcagatgagaatcagataatcactgagacaaatgaatacgtgtgcgctcccaggccgggcacggtggctcacgcctataaacccagcactttgggaggccgaggtgggcggatcacctgaggtcaggagttcgagaccagcctggcccacatgatgaaactccgtctctactaaaaatacaaaaattagccaggcatggtggtgggcgcctgtaatcccagctactcgggaggctgaggcaggagaatcccttgaacctgggaggtggagggtacagtgagccaagactgcaccactacactccagcctggggaatagaatgagactccatcttaaaaaacaaaaacaaaaacaaaacaaaacaaaaatacattgcactccagcctgggtgacggagtgaaactctgtctcaaaaaaataaaaaataaaaataaaacactgtggaaaaaaaaacaaaaacctgtgccacgaagagggacatgaagccaagagagtctataccaggggcctcaggtctcgattgcagtagcccccattccaggcatgggaccaccaccttagcgaacccgaacaactgggaggatttgaaatccgagacataaagacagccaggcctggagtagactgtggctgagatgggagggtgggtatgaaataaccctgtgtctaaggaaaggatctgctgaacccagaaatgaaggcaatgaaatgggagaggagcccgctgcagaagagggccctgcggttgggagctttaatttgcatacagacaattgatgctaattgcaaatcattcttatctgctcattaaagctgcttcctgaagttttctcctaggcaaccaggcttgagtgtggcacagcatttcccaaaatggggtgcttgaggtgatttgggtggtgcggggaggaaaatgttttattttaaatggatatatgcttgctttcatgagtattaggaaaaagagtttgcaactcaccccctgattttacagataccaccttggacaagttaaggagaaaataaaatgagttgatttaaaaaaacatatccaggcccggcgcagtggctcacgcctgtaatcccaacactctgggaggccaaggcaggtggatcacttgaggccaggagttcgagaccagcctgaccaacacggtgaaaccccatctctactgaaaatacaaaaattagccaggcgtggtggtgcacgcctgtggtcccagctattctggaggctgaggcgggagaatcgcttgagtctgggaggcagaggttgcagtgagccgagatcacgccattgcacttcagccttggcaacagagtgagactcagtctcaaaaaaaaaaaaatccatgtggataagagtgtggcctttagtgtcagcccacctgcattcaatccctccctcagcgacttcttggctgtgtacccccaggcaagtaactgaacctctctgggcctcagtttcctcatctgtgaaactagggataaaccacatacctacatcatagggatgtggtaaagattgaatgtacccttagaacagtgctttgacttgaagactgcctgtcagaatcatggggtatgagggtgtatttgaaaaacacacagaaatgaggccttgcctcaaattcacgaaatcagaatatcccccctggtccaagacctgttacaggcagtgctggggacacagcggtgactgggggagccccagtcctgcctgactgacgcattcccagacagagacagcccagaggggtcaggtcaagatgggcgaggcccaggcagaggggtcagggtcagggtggggggcccaggctaaggggtcagggctgggatacaaggcagctgcgaagaggggtcagggtaagatgaggggcccaggtagaggggccagggtgagatgaggggcccaggtagaggggccagggtaagatgaggggcccaggtagaggggccagggtgggctggaggggggccaggcagaggggttggggccatgatggaggggtacagggatgtgagagcccaaagggggcccccctaacccagttgtgagaggggccagcccagttgtgggaggggctttcctggagaaagagtctgagctagccagggaagtcaggagggaaaagcagtccagacagagaatgagacggactcccactgtccatctcaccccacctcactccattggcctcccacagtcttcccatttcagtaggcacaagttccctggatggtcacagagccacctgcttggggccagaccttggttcaagtggccacacgtgcctctgcctcccatggcggccacactgcactgtgcaccgggcagcccagcagcccccctcatgtgctgtcgtcagaacgtgcccctgggctggagtgacagcctgctccccagcctctgctcctggaaggcaggcacctttgaacaggcccagcatgagcactcattgactgccctatgtctacctccacagcactctgtggcatagaacttggtatttattcacacagcgagcgcctgctgtgcaccggggcctctgcagggagctggaacaggcagaccagatccccaccgtcctggtacggacggaggcccatgggaaacagctagtgaataatgccaaaagtcatgaatgaattgtgccaggggacagcctgcagagacgggtggggtctgagggtggatgggatgcagagctggaggaggtgtctaatctagcctagggccagcgataatgttcctgaacgagggtcacatctgccaaggatgagggggacagggaggagggagcgggtgaaggaggagaggggttcagtggggctggagagacattcatctgggatgcagttatacaggtatttgctctgtttttgaaattgtgtgtatatatgcaacatatatatagacacacacactttctgggcctcaatatatgttgtgaacctcagtatgtatatatacaactatgtatatatacacacatatgtttttttttaagtctgttgaatttctcattcagaagaatgtatatatgactatttaccattaacaaaaaaacagaagggaaagatgaggcgtggagaaagtatgtctatgaattagagttgcgtgtgcaaagtccctgtggtagggaggagggtggtatcgtcaggccactgaacacaggcccttgggctcaagtatagaaattgtggctgggcacagtggctcatgcctgtaatcccagcactttgggaggccaaggcaggagcatcacttgaggccaggagtttgagaccagcctgggcaacatagacccatctctatccccctaccaaaacttttttttttttttttttttttttgagatggagtttcgctcttgttgcccaggctgcagtgcaatggcacagtctcagctcactgcaacctctgcctcccaggttcaagcgattctcctgcctcagcctcccgagtagctgggattacaggcacctgccaccacgcccggctaatttttgtatttatagtagagacagggtttcaccatgttggccaggctggtctcgaactcctgacctcgggtgacccacccaccttggcctcccaaagtgctgagattacaggcatgagccaccatgcctggccaaaaatttttttaaattagctgggtatggcagtaggctcctgcagtcccagctactcaagaggctgaggtgagaggatcacttgagcctggaagttcgagacagcagtgtgctgtgattgcaccactgcactccatcctgggtaactgattgacaccctgttgatcaatcaatcactccatcctgggtgacagagcaaggccctggaggtaggtaggtaggtaggcaggtagggcagccaatgggaggttggggaaatcagcagtggccagaacattcagggccctaccagctccattatggagtttggatctcatcttaagagcagccagggtaatgcgggtggatttgtgttccaaaatatggtgctggcagcgagacaggaggcaaagtctctgagggggctgaggcttggatctgcatgggaggacgtgggcctgagctggaggacaaagcaactgtggatgtggcagcaggcggcattgccaggaagtaagctgggagggagatgcaggcccagggcagagccagcaagccatgtgagagtccagggtggctgccacgtgtctggaggctgccgtggcctgggagcacctgaggtgcttgtgagaagaggaggcagagtggggcagccagcggggactgattcttccagtcactgacctttgcagcccctactctgtgccaggtgtcgcagcatccttcccttatggagctgtcattctcctggagacaggacaagacagacagacagccgaaccaccgtggagtgtgccaggaggtgataagtgctggggaggaaaggcaaaaacagcgggtctctgggaaggcttctcaggaggtgatgcgttgtaggaagccagggtgagatccaggcagtggaaacagtagatgactagaccctgagggtgaacttactctcaatgctccagaaatggtcaggtggccagaggggctgaagcaggtgggatggggggagagtggcaggaggtcagcatagtgaggtggcaggagcctggttctagcgggcatattgaccaaagtcagatgctgggatttggttccaagggacatgggagccatgggaggcatttgagcacatcatctgacttaatgtttttaaaaagattactgtgggctggacgtagtggctcacacctgtaatcccagcactttgggaggctaaggcaggtggatcacttgagcccaggagttcaagaccagcctgagcaacatggcaaaaccccatgtctacaaaaaattagctgggtgtggtggcacacgcatgttgtcccagctacttgggaggctgaggttggaggattgcttgaccccgggaagtggaggctgcagtgagccgagatcacatcactgcactcagcctgggtgacaaagtaagaccttatctcaaaaaatgataataataaaatgtaaaaatgaaaaaatagaaaagatcactgtgggctactctggagaggacggactatcttgggcagggggaggatggtggtcagcattcaaaggctgccaggagagggatgggtcctgacacgcccaagcggggagccccctaccctcccttccccgggctgcggcccttgccgtggaagcaggtgcagcctgtagcagcttgtgcccatcgatgacctcacagatgctccctccagacattcgtcatgggagcccagctgccaggcatgctgccaggcgccagtgcctgccatgggcaccgcagtgggctgagtgatcctgggcgggcagccacctggccctcgccctctcctgaggcagcacgcactccagagctttctgggcttccagagcaatttgtcagagctgttaggagcagtcataggctctcggctccacatggagctgacgcagccgggcgttcccaggcaggcaggaagcacgtggccttgcttccccaggctgcgccaggagtccctgggatgcccttctggggacacagccctgaaaggtaatctgagggcctgaagatccaccggggcccaccctgcctgtgagtgttgggaggctggggtcacctgagacagagacctcctcggagagtcacagcttgggaagaggaagcgaggccgtctcctggaactcaagggagtgcggaagccaggcagagatctgcagggcggggagcagtgcaaaggtcccaaggtagcagtgtttctgatgtgtttgaggaacagcttccgcatggctggagcagagtgaaggagagggagtgtggaggagctgggggcagagaagagaggggggcagatggggggccctgtcgggagggctctgggtcttacccagagtgaggtggaaccctgagagagtcctgatctgattcacatgttcccaggatctctctggctgtgtgctgaggctggggaaggatgcaggaggaagagggagccaggaggaggccgctctgacaatacaggtggcagtggttggtggaggtagcgagcagtggcttgattggtatctctgttgaatctcttgcctagaccctctctgtgtctgcttcctgaagacccgtcgcttctgccccacaggccacaggggcaatgtggctgcttacggctcctacactggagcacaattccagccgcatgcagggatgaattggttctccagcccatgacacacgtcagggagagaaagcaagattggtccagggtgaaggccaagtggctgggggccctcggggtatgtgggtgagcagtgtgacttcagggctcttcctctgactgcctatgtctacatcacagctccacctcttaccccaactgcgtgatctctctcaggccccttaggtgctctgaggctcaatgtcctcatctgtaaaatgggggtaataggatctgtcaaccagacacggtggctcgcctctcatcccagcactttgggaggccgaggcgggcggatcacctgaggtcaggagtttgagaccagcctggccaacatgatgaaaccccgcctctactaaaaatacaaaaattagccaggtgtggtggcgggtgccagtagtcccagagactcgagaggctgaggcgagagaatcacttgattgcagtgagctgagatggcaccactggactccagcctgggtgacagaactagactctttctcaaaaaaaaaaaaaaggatcctccatctaaagttgtgagggcgaactgagaccatgagtttaaagcacttatcacaggactggagacatagctgggctcaagtgtatcagctgctgctgtgttttattctcatgtattatgtattgatatttatcgttaacagttgttgtcactgggagtacagaatggtggttaaaatatcgtctctcaaaccagactacctatgtctacatcctggctcttatcccccactagctacatcatttcgggcaagttatttcatctccctgggcctcagtttcccccacctggaacatggaggtggtggtagttcctgtctcggggttgctacggcggctaagtgaggtgacgcctataagatgcttagaacaaggccaggcagcttccacaggctcagagtggtcagcactgtcactgccacctactgtgccactgctcctcctggaggcagggaccacagctcgctccctgagagcctgtcacccacccaggaccacccattggtccccttcagagtccccaggctgaacagaccaaaagcattgcacacacttatgcagctggtatgatttctctacccagcctctggtttttcagctttttttggaagcataaatcctttgactccaacaaaatgttaaatgctcccctaagatgtcaagcaggttaatgcatagctctctggttgaaggtgaggatggaagcacagagcacgttgcctgcccctcccccgctaccaccagtgctgtctgagcccagagcccagggacccaccacctccctggcacctgcagctccgcggttcctcctcaggactcagtgctgagcacttagcacataggatctcgtgaggcaggtgctgtcattgcctcatttctcagaggaggaaactgaggctcactgaggggaatagaccccacgcaagttggccactgtgttgatgggagccaggattggaactgggtcaggtggacagcaaagcccacactatgctgccccagttttcaagttgatattgagacttcaggaggacgcatgggcacactggcgctccagaaagaaagaacgttcaggctgggcgctgtggctcacgcctgtaatcccagcactttgggaggccgaggcgggcggatcatgaggtcagaagttcaagaccagcctgaccaacatgatgaaaccccgtctctactaaaaaatacaaaaattagccaggcataatggtgggtacctgtaatcccatctacttaggaggttgaggcaggagaatcacttgagcctcctgagtagctgggattacaggtgcacaccgtcacacttggctaattttttttttttttcaagtacagatggggtttcgccatgttggccaggctggtctcaaactcctgacctcgggtgatccattcgcctcagcctcccaaagtattgggattacaggcgtaagccactgcacccggctggccacttactttttaccctgtgccatttatgtagtttaattagactttttttagggttggttttttttttgttttttttatttgcttgttttttgttttttttgagtgatggggactctgtcacccaagctggaatccaatggtgcagtcatgcctcactgcagcctcaaactcctgggttcaagcgattctcccacctcagcgtcccaagtagctgggactacaggcatatgccactatgcccagcttaatttgacttttattccgtacatgttccccatcattactactttcagagagaatccattagtgtacactcctccagagatttttctctaaacctttaccaacccagttctttcaaacataccacttaggccaggcatggaggcttacacctgtaatcccagcactttgggaggtcaaggcaggtggatcacctgaggtcagcagttcaagaccagcctgaccaatatggagaaaccccatctctactaaaaatacaaaattagctgggtgtggtggcacatgcctgtaatcccagctactcgagaggctgaggcaggagaatcgcttgaacctgggaggcggaggttgcagtgagccaagatcatgccattgcactccagcctgggcgacaagagtgaaactccgtctcaaaaaaacaaacaaacaacaaaaaaacaaacaaacaaacaaaaaacatgccacttaacccttaccttgcaagaaatacagtgactttttaaaaattctagtttagctgggccgggcgcggtggctcactcctgtaatcctagcactttgggaggccaaggtgggcagatcatgaggtcaggagatcgagaccaccctggctaacacggtgaaaccccatctctaccaaaaatagaaaaaactagccaggtgtggtggtgggcgcctgtagtcccagctactcaggaggctgaggcaggagaatgacgtgaacctgggaagcggaggttgcagtgagctgagactgcgccactgcactccagcctgggtgacagagcaagactccatctcaaaaaaaaaaaaaaaaattctagtttattttgccaggcgcagtgactcatgcctgtaatcccagctctcagagaggcagaggcaggaggatagcttgagcacaggagttcgagacctgcctgggcaatttagtgagaccccattccccacaaaaagggggaaaaaaggacaaaaaaaagtataaaattctactttatttctttttttctctatacatatgtgtgtatatctatctatatattttttcccttaaatacacagaatcatgttttataccatgcatcgtttccatttactatagttcagaccatctgtcctcatacataaacagagattgacctttgcactggctgcatagtttttgatcataaggatatgcttgcggcagggcgcagtggctcatgcctgtgatcccagcaccttgggaggtcgaggcaggtggatcacttgaggccagaagttcaagaccagcctagccaacatggtgaaaccccgtctctactaaaaatacaaaaattatccaggcatggtggtgaatgcctataatcccagctactcaggaggctgaggcacaagaatcgcttgaaccccggaggcgcagaggttgcagcgagccgagatcacaccactgcactccagcctggccatttccaacttttcctgattataaacagtactacagagaccgtcctcatacctgcctgtgtgtgcttgtgcaggcttttggtgtgtgtgtgtgtgtgtgtgtgtgtgtgtgtgtgtgtgtgtgtgtgtgtgttttgtagctaagactatgggactatgggcatgtgctattattcctggctatttttatttttttgtggaggcagggtctctagggctgggcatggtgcctcacaactgtaatcctagcactttgggaggctggggtgggaggatcatttgagccccggagttcaagaccagcctgggcaacatagcaagaccccgtccctagatagagtctctacagcaactcctgggctccagcagttctcccacctaagcctcccagagtgctgggattacagcatgagccaccatgcccggccttgtgcaggcttttctattgcatggatttctgggaggccaaatgtcttgtttttgtttttgagatggagtctcactctgtcgcccaggctggagtgcaatggtgcgatctcggctcactgcaacctccgcctcccagattcatgccattctcctgcttcagcctcccgagtagctgggactacaggcgcccaccaccatgcccagctaatttttttgtatttttagtagagacagggtttcactgtgttagccaggatggtctcgatctcctgacctcatgatctgcccgtcttggcctcccaaagtgccgggattacaggcatgagctaccacacccagccaggccaaatgttaagctgaagccagtcatccttcagttctcagttctgatgctcttgtctcctggggaaagcattcctgaccattcttggtgttacatgcttcagtagttccctggacatctcctcaccaatgcctactctttgctccattgatagatgttgctaaattgtggaaagcattacatagttgctgtttcaatccagtcggacaatccctgccttttgatgggagtgttcagaccattcacgttaaatgtaattattactgctaatggttggatttgcattagccattttgctattgtttctgtatgtctactatctttcttgctcctctgttcttccttactgccttatactgtagtaaataaatacagtttcaggccggatgtggtggcttacacctgtaaaatcccagcactttgggaggcccaggcgggcagatcacctgaagtcaggagttcgagaccagcctggccagcatggcaaaaccctgtctctactaaaaatacaaaaattagctgggcgtggtggcatgcacccgtaatcccagctactcaggaggctgaggcaggagaatcgcttgagccagggaggcggaggttgcagtgggccaaggttgcaccactgccctccagcctaagtgacagagtaagactctgtctcaaaagttaaaaataaaaaatatatataatttagtataacatttggattctactcttgtgtaactatctttttagttattataatgtgcgtctatcactgcaattcaggttaatactaaattccaataaaatataaaacttttctccaatattgtcctatttccttctcccttttttgtgctctgtttatcataaacatccatatgtgttttaacccagcagtatagtattgtcattattgccttatacagtcttatgtctttaaggaagttaagagaagaaataagaaagcatatacttttatagaatcttattttaaaccacagtttgccatcttgggctattcatttctgtctactgactcaggtcattgtctagagtcatttctttcagcctgaggactttttttttctttttttttagatggagtctcactctgtcacccaggctagagtgcagtggcgcaatctcagctcactgcaacctctgcctcctgggtttaagcagttctcctgcctcagcctcctgagtagctgagattacaggtgcccgccaccactcagttaatttttgtatttttagtagagatggggtttcaccatattggccaggctgcgagctctcctgacaggcgatccacctgccttggcttctcaaagtgctgggattaacccgaggagttttaaaattattttgtatcaggcaggtgtgctagcaacaaattctctccatctctgtttatataggaacatctttctgttgccttcatttttcaaggatggttttgctgggtatagaattcctggttaacagttgttttctttcagcactttaaaagttacattttatttcattcttttaaatgagaagtcagcaattaattgtgtttttttttcttttttatagaagtggggtctcactgtgtttcccaggctggtttccaactcctgggcttgagtgatcttcccgtcttggcctcccaaagtgctgggattataggcctgctaattgtattgatgctcctctatatgcgatgcatcatctttttcttgatgctttcaagatgtttatcttagcatttttctttttttcttttctttttttttttttttttgagacaatttcactctttttgcccaggttggagtgcaacggcataatggcgtgatctcggctcaccgcgacctccgcctcccgggttcaagcgattctcctgcttcagcctcccaagtaactgggattatatggatgcgccaccacacctggctaatttttttgtattttagtagagatgtagtttctccatgttggtcaggctggtctcgaacttctgagctcaggttatctgcccgccttggcctcccaaagtgctggaattacaggcgtgagccaccgcgcccggccagcatttaactttcaactccttttctaggtgtgaatctctttgtatttttcctacttggtgtttgttgagcttcttggatgtgtaaggttttcatcagatttaagaagtttccaaccattatttcttcaaatattttttctgccccttctctcctctccttccaaagttcctgatgcacatatgttggtacccttgataccgtcccaaaggttctgctctggaagaacttcttcactcactgagctgggaagaggtggggggaggacaaaatgcgacaaatttcctctgttcttccctaaagttcagtttctcaagcatacatgcttctcaaattgttgtatgtgtttggtcaattttcggagtactgaaatggtcatttgtggtcaatgttgtcatctctggggagatgtgccagtcttctcatttgactgtagtcaaagtaccatcctgtgatactgctaaattgaccctcaaaagggatttattaacttatatatataatcctagctgggtgtgctggcacatgccgtgttcccaggtacttaggaagctgaggtgggaggatcgcctgagcccaggagttcgaggccagcctgggcaacatagcgagaccttgtctctttaaataaacaaaaaaccaataatcctcccacccatcccccacaaaatgcccccttttatatacacatgcgtatgtttttgcatagaaaaaggttgaccgggtgcggtggctcacacctgtaatcccaacactttgggaggctgaggtaggcggatcatctgaggttaggagtttgagaccagcctggccaacatggtgaaacgctgtctctactaaaaatacaaaaaacttagctgggcgtggtggcacacatctgtaatcccagctactggggaggttgaagcaggagaatcgcttgaacccgagagactgaggatggagtgagctgagattgcaccactgcactccagcctgggcaacagagtgagactctgtctcaaaaaaaaaaaaaaaaaaggttaagggccaggcccagtggctcatcctgtaatcccaacactttgggaggccaaggcaggcggattgcttgagcccaggagctcaagaccagcctgggaacatagtgaaaccccatctctacaaaaattagctaagcatagtggtgcatgcctgtagtcccagctactcggaggctgaggtgggatgatcacttgaggctgggaggtcgagcctgcagtgagctgagatcgcgccactgcattccagcctgggtgactgagaccctgtctcaaaaaaaaaaaaagaaaggttaggaaggaaatagagcaaactgtaagccatagttccctgtcgagatgggcaggaggtaagatccccacctttagctgcgtaggttgtaccaaggagacgggagtgaatttttcagattcctatagaggaaccaaatgtgctagaaggccatccttgggtgggattaggcgctgtgcaggcagtcttcccttttctacagataggcgtctatactgttggaattttccacagcggtaatatatttgtgtctgtcttgtgcaaatgaacttttttgattcccaagagtaaacttcaatagctctgtcttgccaaatgtggaatggatttggttttttttatctctttcatttttgctttgcagtgacatgggctcgagggttggctaccccgctcaggtttacaaaactgccagtgcagagactcctcggccctcccagctggcccagcccagcccctttcagctctccgcctccgtccccaagtccttcttctccaagcagcctgtacgcaataagcacccaacagggtggaagagaacggaggagcccccaccacggccactccccttcagtgacccaaagaagtaagtgcctggacgtccagcgaggcgcccgccagatccacaccagggcgtctccggggcggaaagagggtgatgccacatgctgtcattgcacagacgactgtgggccagtgtaccagtgtacacactggggctgcagctgcaagcaggacaggcgagaacccctcttggggagctggcattccatttggggtgaccaacaataagtagaataagagaagcacgcaataggtcaatggtggttatccttgtgccatatccgggtgtggaacattccagggagaaggcatagcagctgcagaggtcctgaggcagtgagtgacacggttgcctgtgggcaggccggggtggctggaacagtttgggccaggggagggtgtgggaacatgaggtcagggagggatggggacagaccatggagggtcttgagggccacgtggaagggacttggcatcttccctgactgagatggagccacgggagggcatggagcagagagggggcaggatctaaattgggcattccagggtcgctgtggctgcgtgtggggaacagcctgcgaggagcagggaggagctgctgtcatggtccaggcgcagacgaaggggcgggagcagggtgggggcggagagggtgagaagggggcggttccggatagattatctgaaatggagcagaccgggcttgctggcagggtggatgtggtgtgagagaaagagaggggttgaggatggtgcgtcgtcttgaagcccggaggacagacttgccttgagtggggagcaggcttggggaaggcacagtagctcaatcctggatgcttcggtgcgagattcgcaggagacatccagacggaggcgtgaggggggcccttgagtaaggaatcccgaattcagtggagaggtcaggctggagggagaactttgggtgttatcagcctagagctgcgaggctggaagagcccctaaggcagggtgtggagagaggagaaatgtgggactgagactgaaaccccttgatgttgagccaaagtgagaagccggggaaggcggggaggtgcggaggcggagaggtgcggaggcggggccagggccaggagaggcggagctcgggcgaggaggctgggcccaggccagggtgatgagactgagaaccgactatatagggttaatcctcccagaggtcgccggagggttcaggagaaaagggtgaggcagaattgaggagctgcgtgagcagttcatttggggcattttgctttaaagtgaaagaggagaggggtgtgcagttgagaaagggttttgtttttcagtcggaggatacaggagctaacattgcctgagcactcaccacatcgaggttcagttctaagtggtttgatgcgaatgaatttactggatcccacaacagctccatgggggtggacctgtcctccccccaccccacccctttttttttgagacggagtttcattcttgttgcccaggctggagtacaatgacgtgatctcggctcactgccacctccgcctcccgggttcaagcgattctcctgcctcagcctcccgagaagctgggattacaggcatgcgccaccaagcccggctaatttcgtatttttagtagagacggggtttcaccatgttagtcaggctggtcttgaactcctggtatcaagtgatctgcccgcctgagcctcccaaagtgctgggattacaggcgtgagccactgcgcccggcccctgtcctcccccttttacagatgaggcagctgaggcccagagtcacagggctggtgaggaacacagcctggatcagagcccaggaagcctgggtcaaggctcacgtctcttgagtgaggggctctgccctcctccatcctgttctttgtagtgtcatctttcatgacctacatggagacattcaaatccggggatgacacagagcttggagggagagacgtgtcaggagacagaaacagtgtccctggagatatcagcaggcaagtgtgctgagctcacactgagagccagaggggattctgaaaactagactgatgattaaaactgcttaaaaactcagcagcctccccatgctcccgggattaatgatgcaggctcacattgactacacacgtttataccaggcgccatgttctttgccgaaactcccgctcagagcctggatgatctgcccctcacctctgccctcgttcccatccactctcccctccttgctctgttccagccacactggcctcttgctgttcctcacactctccacgtccaggcacaccccagggcctttgcactggctctcactgctgcctccagtgagctccctccagatcttcttgggtgcagctcatgaggactcgctctaatgccaccccctcaaacaggtcctcctggccttcagtagcccaggctgtcattctgtgtcactgtactctgttccacatcccgtgtcccccatgggaaacaggtgccaccgtcttagtcacaaggcacttgtaacgtgcctggcacacagggcatgctccatcctgaacataagacgtgtggatcttgtttgattctcacgtgaccccaataagtagatactataaggcccccacttttcagtgtggcccaagttgggccctgctgaaccctgttaccctcctcaacaatcacccgtacacactgcttcctctgcctggaacccaccccccaacccgcacccccactctaggcccactcctgcccacccatgttaatttgctggggcagccgcaacaaactaccacacactgagtggcttaaactgcagaaatgtatcatctcacagttgcggaggccagaagtccaagttccaggcgtcaacagggtggttccctccaagggcggtgagggagaacctgttcctggcctccctcttagcagccggtgggtgtcagcacgtagattcatcacccccgtctctacctcctcttcgcatgatgttctccctgcatctgtgcccacatttcctctttctgcaaggacgccaatctaacgggattaggggtctaccctaatgacctcattttcacttgattgcctctgtaaagactctgtctccaaatgaggtcacatttggagatgctggggcttaggacttcaatgtagctttttgtggggccccagttcaacccataacaccactccttgggtatcaacacagacacgcctttcttgcagaagttgtctgaacccccacaccaggctcagcccacccccagcacctgtcccagggcacagcgaccgccactcccttggcaacttgcttcctctctgtcacccccatggggcccagaacagagacatcctgaacctcacccagaccacacacttagtaggtgctcagaagatgtacctggagagacaacaaccctatccaacaacagctttcccagtgatgaaatccagagatggcttgtatatgtgtgtgttggtgtaaacatatgtaaactaagcatataaaatatcagcaggagacacaaatgaaatcgcttcatagttccttttaatatttatttatttattaatctatttattttatttatttatttttgagatggagtgttgctctgttgcccaggttggagtgcagtggcgtgatctcggctcactgcaacctccacctcctgggttcaagcacttcttctgcctcagcctaccaagtagctgggactacatgcgcataccaccatgtctggctaatttttgttttgttttgttttgttttgttttgttcttcttaatttttgtatttttaatagagacggggtttcaccatgttggtcaggctggtctcgaactcttgacctcaggcaatccgcccccccttggcctcccaaagtgctgggattacagttgtgagccaccgcacccggccccttttcatatgtatttagttgcagatacattttaaaaatcacaaccaaggccgagtgtggcgcggtggctcatgcctgtaatcccagcactttgggaggctgaggcaggtggatcacctgaggtcaggagttcgagaccagcctgaccaacatggagaaaccctgtctctactaaaaatacaaaattagccaggcgtggtgtcgcatgcctgtaatctgttccacatcccatgtacagctactcgggaggctgaggcaggagaattgcttgaacccaggaggcggaggttgtggtgagccaagatcgtgccattacactccagcctgggcaacaagagctaaactctgtctcaaaaaaaaaaaaaaaaaaaaatcacaaccagatgcagtgtctcacatctgtaatcccagcactctggaaggccgaggcgggggaattacttgaggctgggagttggaagccagcctgggcaacaacatagtgaggtcccacctgcataaaaaaatttttttcagccaggcgtggtagctcacgcctataatcccagcactttgggagtccaggatgggtggatcacctgaggtcaggagtttgagaccagcctggccaacatggtgaaaccccatctctactaaaaatacaaaaattagccaggtgtggtggcaggcacctgtaatcccagctactagggaggctgaggcaggagaatcgctagaacctgggaggcagaggttgcagtgagacaagattgtgccactgcactacagcctgggcaacaagagtgaaactctttctcaaaaaaaagacaaaaggcactttgggaggccgaggcgggtggatcacgaggtcaggagatcgagtccatcctggctaacacggtgaaaccccgtctctactaaaaatacaaaaaattagccgggcgaggtggcgggcgcctgtagtcccagctactcgggaggctgaggcaggagaatggcgtgaaccccagggggcggagcctgcagtgagccaagattgcgccactgcactccagcctgggcgacagcgagactccgtctcaaaaaaaaaaaaaaaaaaaaaagacaaaaggaaaaaaaaacttttttcaaggcgagtggatcacctgaggtcaggagttcaagaccagcctgaccaacatagtgaaaccccgtctctacgaaaatacaaaaattagccgagtatgatggcaggtgcctgtagtctcagctattgggaggctgaggcaggagaatcacttgtacccaggaagcggaggttgcagtgagccgagatcgtgccactgcagtctagcctgggcgacagagtgagactctgtctcaaaaaaaaaaaaattgcatatataaaatattaacttagaattattatttttgttcatacattccccttgtatgtgctgtagctcactgagcattttggagacagtgtctttgttatcgtgagaggcacttttgagtcacttcacttctaactcaattattttagattaaacatgttttgttgttgtggtggtggtggtggtggtggtggtgacagggtttcactctgttgcccaagctggagcacagtggcatgatcacagctcactgcagcctctgcctcctggtacaagtgattctcgtgcctcagcctcccgagtagctgggactataggtgcccgccagcatgcccggctaatttttgtatttttagtagagaaggggttttaccatgttggccagtctggtctcgaactcctgacctcaagtgttccacctgccttggcctccaaagtgctgggattacaggcgtgaaccaccatgccaggcccaaaatttagacaacagaggcaactcagagatgatgtccagtcctgtcagtcagaacctggaggatgttttcttcactgaggttttgaaagataaaacatgcacaaggtaaaaaataaaatactacaaaagggtttgcaatagaaagtaagcctctcggccaggcgcggtggcgcatgcctgtaatcccagcactttgggaggccgaggcgggcggatcacgaggtcaggagatcgagaccatcctggctaacatggtgaaaccccgtctctactaaaaattaaaaaaaattagccgggcgtggtggcgggcacctgtagtcccagctactctggaggctgaggcaggagaatggcgtgaacctcggaggcggagcttgcagtgagccaagattgcgccactgcactccagcctgggagacagcgagactccgtctcaaaaaaaaaaaaaaagtaagcctctctcccttccctggccctcagccatcctgctccctccccaaaagcagccattgtttcatttctgcatccttccagaaatgttccaaacgtgactgcacacacatgattgtgtgggcttcccttgcacctgttttattaatgtggtcacctcctgcatatgaactacttcctcacttgctcttgctcttcaagtcttttttttttttttttgagacaggctctcactgtcacccaggctggagtgcagtggtgccatcatagctcactgcagcctcaacctcccgatctcaagcagtctcctatcttagtagctgggcccataggagtacacaaccacacccacctagttttttactttttgtagaggtgagatctcactgtgttacccaggctggtctcacactccgcactcctgggctcaagtgatcctcccacttacgcctcccaaagtgctgggattacaggcatgagccaccatgcctgacctaagtttcttggcaatagttccgtatcagtgtgtagaaagtgatgtcatttttggccaggcgcggtggcccatgcctgtaatcctagcactttgggaggccgagatgggcggaccacctgaggtcgggagttcaagaccagcctggccaacgtggtgaaaccctgtctctactaaaaatacaaaaattagccaggcgtggtggcaggcgcctgtaatcccagctactcgggaagctgaggcaggagaattgcttgaacctgggaggcggaggttgcagtgaggcaagatcgtgccattgggctccagtctgggcaacagagcaagaccctgtctcaaaaaaaatagaaaaagaaagtgaatcccacacgtgtccagtattagaaacgagagtttggtaaactccagtataccaagctgagctgtgtgtgagttttctaaaaatggtttcgcgctatacatgctgcttttttcacatgacgtcgtatctgggattgcctctgcacgccatgtggatctgccatgcgtctctggagggtgtgattctgggtggtgggcctggccctttcctggctgggggctgctgtctgctccacagacaggaccctgggagtgtccgtgcacatgtggcactgtggactcatgtgagcctttctgaaggacgcgtttccagaagtaggactgctagtgcagagagcaagcacattttattcatgcttccaggaggtcttggcacgcccctctcgaggggagcctgtgggcagtgcactggctggggggcgtgctgaaggccaggcctgcttcctcactgccgggagatgggcaccatgagccctgcactgagtcacactcccctgtgcagggcattctgggaaatattgaaatcaaaaggggtgggggagtccccttttgatttgtgtctgtctctctgtctctctatttctctcttttgaatctaaagcttttaatttgcccaaagaatacacatccctgataactgacagacccagcattaccctagacctggaattccaatttggggaggaatatgacctgaccaggaaaaaacctggccttgctctcgcccttcctttgttaaaatcccaaggctggcagctgagaaacagaaaaaggaaatccagtctttaaaaccctcgggaacccaagacatcttatttcttccccaggttcaaagcctctttttctttcttgcattacagaatgaagaagtccaggcaaaagcttttattaagctagtttttattatttttattgttataaccatgattatggttaagtaaattcagacacttcagaagaatatcagttgaaaagtaaaagtcccatttttccacctcctaataagattcctacctcccagaggttatcatggttcataatttcttccagaaattgttatctgcagacagaagcatatttttaaatccaatgtggctgttccccacaccatacgtgtttcctgccatctctgatatacacgtgacagtcaagcttggcagtggcgtgggtaggcactgcagcctggcggccttgatttgaaacctgactccttcacaggctgtgtgacttgggacaagtggctaaactcctctgtaccttaacagcctcatccatgagatgggataccaatagtctttaacatatatggctgtggtggggatcaaatgaatttataagctgggcatggtggctcatacctgtaatcccagcactttgggaggctgaggcggaaggatcgcttgagcccaggagtttgggactagcctgggcaacctagtaggaccccatctttacaaaaaaattagctgggtgtagtggcatgcgcctgtagtcctagctacttgggaggccagggtaggagggtcacttgagcccaggaggttgaggctgcagtgagctgtgatcacactgctgcattccagcctgggcaacggaggaggctctgtctcaaaaaaaaaaaaaaccaaaaagcaaaaaacacacacacacaaatgactacatatatgttccaagggaaacccaggccttgctctggtatggttcacgttctgctgggtagactgacaataggcaaagacacaggtcgggcacggtggctcacacctgtaatcccagcactttggggggccgaggcgggtggatcacctgaggtcaggagttcaagaccagcctggccaacatggagaaaccctgtctctactaaaagtacaaaaattagctgggcatggtggtgggtgccccaatccttgctactccagaggctgaggcaggagagtagcttgaacccaggggcagaggttccagtgagccgatatcacaccactgcactccagcctgggtgacagggcaagactccatctcaaacaacaaaaaaaagcctctcccctcacacagggggtctgtctctgtgcatgtgttcagcgtgggcctcccccactggctgccagctcggtgctcacggccgtgtccccagcacctgggacaggacagcacagccagctctgtgtggttcccggaaaacgtttgtggaagaagggaatggagccaagcccctctctgccacgcgtttgctgggtgaaggagagaaggctgtggccatgcgtcccgtggtggccggccctcttgaatccaaacagctttgaaaagtggcttgagcctccctgacacccctctgaccctgacgctgtcattccaggcaggtggacacgaacaccaaaaatgtctttgggcaaccgaggttgagggcatccctccgagacctccggtcaccacggaagaactacaaatccaccatcgaggatgacctgaagaaactcatcatcatggacaacctggggccagagcaggagagagacacgggagtacgtagggccctgtcccccgctcccgacccccagctcccaaggggatcccagatctgggcaggcaaggagaagggctgtgctccccacggtcacgccagctccttcccgtcgtgtccccagcctttggcatctgccagtcctgttgggggctatgggctcatggctgggagtgagggcagcgcattggtctgggatggaatcacaggataagcccaggcaggcactcgggaatctaccccataccgagaacctcgcacaactggagggcctcgtgccctcctcctccagcccaggatagaaacagccacatccacccaaaccacagggactgagagtggagcaggggctcccagaggaagttcagactcttgttactcagggacacgggtggaaagaacagtgggtgccagggaacctccacagcatccacttcccttcccctcccagccaggcctgccctactcgtcctcactgccaggcaggagctgttttgtggggactgaggtggaccccagcctccccagggttgggtcccaccagcctacagctgggggaagagagcacatcagcccagcgctacccactggggtcccagcactgactctggtgggtccagcttggctcacaccaccttccccaacccatcaggctttgatcgccagccttacccggagctggagggtggggttggggagtgggagtccctgggggaaaactggagcgctttgatcagaaaggaggcagaaggccaggggtggtggctcacacctgtaatcccagcactttgggtggctaaggtgagaggatcacttgagcccaggagttcaagaccatcctgggcaatgtaatgagaccctcatctctataaaaaaaatgtaaaaattagccaagggtggtggcatgcacctgtggtcccagctacctacctgggaagctgagataggaggatcgcttaagcccaggaggtcaaggttgtagtaagctgagatcgccccattatactccagattgggcgacagagtgagaccctgtctcaaaaaaggaaggaaggagggaggggggagggaggaagggagggagggaggaaggaaggaaatggggcagaaatggatgctgggtaggtaaggactcgccaccaatgtcctagaggggaagatgcctctgaggaccctggctatgagccagtctgtgacctcccccaacatcccacccacgccccacagcagtcaccgcagaagggcctgcagcggacgctgtcggacgagagcctgtgcagcgggcgccgggagcccagcttcgccagccccgctggcctagagccagggctgcccagcgacgtgctcttcaccagcacctgcgccttcccgtccagcacgctgcctgcacgccgccagcaccagcacccccacccgcccgtcggccccggtgccacccctgccgccggcagcggctttcccgagaagaaatgtgagcctgggccccctgggactggcgcggtagttaccccaaggttgggaggtggggatgcccgagcaggggctcacctggaggtcaaaggctagaggtcatcagtgtcggggccatctcagggaggaatggggttcacaggaacttcggggggcctgatggtggggcactgggtgtcacccaaggagcaagggatcattggccaagcatcagagggtcacctaggagtcagaagcacccaaggattggagtcacctgagaccagagaagaagtccaccctcagggtacaggcctagggaatggggctgcccagctgttgccctagcaccccccaaccctcccacccattccagctctaagcggtttgcttcctgagcattttatttgctttcctgactgctcccatgtttgccacacttgggggtggtgcatggtatgacttgttcactgcttaatcacccagaaaatatttactgagcactccccgtaaacaggtactgcgcacaccacccgcatcaaaagccacgagccagctggagttggccgtgccccagatgcaccctgtaaccccccttacccacctcctaacccccccacaactgaaagacagtacgtaagtttgcaccatgctcactgggtggcgaaacctggcctggaggggcgtgaggctgtttagggtccatagtccccctacttagtgctagcaatgaggagcttggggcagagcgctggcgtgccactgcgcgtggggtgcccctgacctttttgagtttgttacataatacacagcatctgcacacttactctctcaaatccaagcacatctcaaattcagaggcatgttctaccccaagggtctcagctgaggggctgtgcctgcctgtgccatctgtacagagcctcttgtgagctgtgggggatggggtggaggagactctgggaattttatgaagggcagtctgtctcccctattaaaactcccctgcaggccgggcgcggtggctcacgcctgtaatcccagcactttgggaggccgaggcgggtggatcacctgaggtcaggagttcgagaccagcctggccaatgtggtgaaaccccgtctctactaaaaatacaaaaattagctgggcatggtggcaggtgcctgtaatgccagctcctcaggaggctgaggcaggagaatcacttgaacctgggaggcagaggttgcagtgagctgagatcaagccactgcactccagcctgggtgacagagccagactccatctcaaaaaaaaaaaaacttcccctgcagctccgttgccttggcatttgcatctgcactccttgccctggtggtgtggggtgcccacctctgctcctccacctcacagagccttccttttgatcactcagcacaccagaccctccctgctcagggcatcctgcacggctgttctctccgcccgccatgctcttccctcagtcctcttctgggtcactcttgtccttcagggctggctccattcctgctttttcctggaaggctcctctaagccctggactgggtcccagcccccatctcaactccagagcttctgggccctcccctgcgctcccttcctgttcctgcagcgcctgctgtgggcggggctctgccctcggtgccaggatgtggccctgagcaagcagagcacacccctgccctcacagggctgccactttagtggaaatttccctgctccccaggcttccctccacgtctccttcctcggcctctcctccctgctgctctgtctctctgcccaaggcagggctggtcacgaagtagatgttcagtcactgcaaaggacggggacagcggccaccacggagaggtggtgacagagaacacaggcatagactccacaggccgatccgaattcctccagcttgctgtacctcattctttcagtcttggctcagatgccccctcctccaggaagccctcccttcccctaccaggctgagtcaggcaccaccacaggccccgtccccccccgcccccccgggtttctctcacccccctccgtccctactcaccgccttgtatccccatcaccatcctgagctgtcactagatgagaatgtgtctgtctccaccaccataccgggggccccccaaagacggggcctggggttttctctgtcactgctgtgaccccagctcaggtccctctgcatcacacagcacacacacacccttctctgtccatctgactcccccacacccctgagctggggagagtcccgtctggcctcagtgtggccagggaccctgggcctctccatttcttgtgtgcctgctccagagcccttcccgggccccatcccagatgaagagacatggtcatccctggcctgggcttcactaaccaagtgccctccacaccaaggagcctgtcacacggtgctcctgatgccctgctcagcaatggcagccactcccgtggctcccaccagctgagcagtgagacgccagcaggctagaggcacagaacaaggaggccaggggaagagcaaggaggcccagggtggagcatggaggtcaagggtggagcaaggaggccaagggcggagcatggaggtcaagggcagagcaaggaggtcaagggcagagcatggaggtcaagggcagagcaaggaggtcaagggcggagtgtggaggtcaagggcagagtgtggatgtcaaggcggagcaaggaggtcaagggaggagcatggaggtcaagggcagagcaaggaggtcaagggcggagcgtggaggtcaagggcagagcgtggaggtcaagggaggagcatggaggtcaagggcagagcatggaggtcaagggtggagcatggaggtcaagggaagagcaaggaggccaagggtggagcgtggaggtcaagagtggagcaaggaggtcaagggaggaacatagagtcaagggcagagcatggaggccgaggggggagccaggaggccgaggggggagcaaggaggctgagggacgagccaggaggccaaggactcgttcattcagccagcacttactgcacaccacatatcacagagctgaacggcctgagtttatgtcccacgtcttccactcacagatataacctctctgtgcctcagtttctttgactgtaaaatgtaaaaaatagtgcccacatccctgggttaaaagaatcaaacaagtgaatatgtggaaagcacgtagtgtatacctcatatgtagtcagcactgagtagtactagctggaagccatgtgagcccaggcaaggcagcgcctcgctcgggtctcagttttcctcttccatgagcagagatcatgtcaccccccgcctccgccagcctcacagtgaggctgtgagatgatctcccttggccctgcacagaggaggtgccgggaatgcagagcgggctgggcccacggtcaggctctgccgattcccagctaagggccctgaggtgtgtcttctggtctctctgtacctggctgtcctctgtccccttccctcaggggcttcaaggagtcacagagccccaggccagagcccgagcctggtgcctgggactctctcaatagccgcagcaggtgcgagtgcagtgctggcgccgttgcttctcacttccaactcctgagatgtcacaggcctctcctctgctcagcgtgtcatacctgaacctgcccccccacggcaaccccaccccgtgtaaacactgtccatacactggcgattccaatcacaggtgcagctgggactctcctcgtcgccagctcctgtggccagcctccgtcccaccatctccttggaatgtccagggccatctccaccgagcacctccagaaacagatttctgatcccccaccccagccttcccgatcagagccgcaatcctggcccttctctttgtttcacagccatatccaaccctcaggaaatcctattggctgcccctgaaaagtaggcccagaatctgcccctgtgtcctatcacggccccaccctggtcctgcccagcatcaccgtctccattgtgggttatggttacagctcctacctgctccctgtctccccccaaatccccccccaaacacacagtccgtcccccacatgcacccagagggagtcttccagggcactcagggtgagaacacagtcgtcactgggacccacaggccccacacggtccggccgtgttgcctctgttctcgcctcctgctgcttcctcccttgctcaccctctcccagccataggggccgcctctgtgttccttaaaccttccaggcacactcctgcctcagggatttagcactggctgttccgtctgcctggaatgttcctcccccaggtaatccgcctggtgcactccctcctccccttcagagttttgtccagatggcatctctgccaggcctggcccagcaccctgtttgaagtcaggcctctgtaggctccagcactcccagaccccttaccctgctggaggttttcctgggcatgtagcatctctgcataagcaatgggatgtcttcatgtatttgtgtctcccgcattgtcacactcaaccactgccatctccaccctccccatccagccaccatctcagcctcggagctctcgctggctgatgggcgggaccgccccctgcggcgcctggaccctgggctgatgcccctgcctgacacagctgctggcctcgagtggtccagcctggtgaacgcagccaaggcatacgaaggtaggcgccttccacccagtcccgccaggcccccaccccgtcctctgttctagagggattcatggagggcctcatggctttgcagggatacccactcaggttccagaatcagggagcagggttcaagtcctgccccgtcacttgcttaccatgcagccccgggcaagcgtcgtcatctctttgatgccagcgaaccacgttgaccaacaagcggaagtgaccatgcctgaggctgccatgacgattacacaaaacaccacgtgtaaaacacgtgaggccaagcacagtggttcacacctgtaatcccagcactctgagagtccaaggcaggaggatcgcttgagcccaggaggtggaggctgtgtggtgagctgtgatcacaccactgcactcactgcactccagcctgggcgacagtgcaagaccccgtgtctgggggaaaaaaaaaatctgtccctgaggacatttgggttttcagcgccagatctgggagccagggagcggaagacttttagtgccctgagggtcctgccaagaccttgcatcctgggttgggggttccccataccaggcctgcagggatcctcactccctgggttccctggagcagtggacagggtttgctctgccacccagggccctttatgtgctggaagtccgtgctgacggggccaggcagctgtggcatctcctctctcatgtgggtctccaagcatcctggggccaggacagccagttccaggacagtgggaagtgaggaaggcctcaggtctctccctggagacccagatgccatcagcggttgtagtgttgtttgcggaagacagagctgcccagacactgaccactcccccgcaaccgtgggccacaggaaagggctaggatagccagagccccttacccactcccagccgctccgtgtgcctggcatgcctgggagctgtgcgccccatgtgagaaagctgagggagcctggctggtggcactgatttctcccccaggctgtgcgtcacagtcgcctagggagctttttgcttccttataaaattaatagatgaaacacagaaggttacgggggagaggggggagtagcagaaagacctgggaggaagcacaccagcaccaccatggaggtgcctccccgggagccggaaaggggctggcagggagtgcaggtcagggtggtttcagcttgcctggaggtgtggtttttaatgaagatatatgtgggttttcccttgcaattcacataagtggaaaagactaaaggaattctcattaactttggtagatgtgttcatagcatagtaattttcttaaatatatatatatatattttatccactagagctacttagtgaagtttctacagatgaaatacaaagacatctagaatttgatttaaaatattccaggttgggtgcagtggttcgcacctgtaaccccaacactttgggaggtcaaggtaggaggatggcttgaggccaagaattcgagaccagcctgggcatcgtagcgacaccctgtcactacaaaaaaatttattttacttatttattttttagagtctcactctttcacccaggctggagttcagtggcgtgatcttggctcactgcagcctccacctctcaggttcaagcaattctcctgcctcagcctcctgagtagctgagattataggtactaattttaaaattagccaggcatggtatcacacacctgtagtccaagctcctcgggaggctgaagcaggaggatcgctggagcccagtagttctaggctggagtatgctgttctgatgcggtgtcttcactaaactcaacatcaatatggtgacctccagggagccagggaccaccaggtttcctaaggacaggtgtactggcccaggtcagaaatggagcaggtcagaactcccatgctgatcagtaatggactcgggtttgtgaatagccactgcactccagcgtgggcaacacagcaagaccctgtctcttaaaaaacagatgtcattatacattaaattcaagatagaaaaaaatagctataaagggtattattcagagaatcggagaacatttgcagatgactgtatattagataatatcatggccaggtgtggtggtgcatgcctataatccagcactttgggaggctgaggcaggcagatcacctgaggtcgggagttcgagaccagcctgaccaacatggaaaaatcccgtctctactaaaaatacaaaattagctgggcatggtggtgcatgcctataatcccagctacttgggaggctgaggcaggagaatcacttgaacccgggaggcggaagttgcagtgagccgagatggcgccatcgcactccagcctgggcaacaagagcgaaactccatttcaaaaaaaaaaaaaaagtaaatgggcaaagtattaacaatgagtggtgccagggaaagagtgctggggtttttactgtgctattcttgaggcacagaaatgaaagttggacccaaggagctgcttgcctctggggctggccctctgccctgccctgccctgcccctgatggtgccgccctcaacacacggcacacagggacgccttggtgtttttaacacctccgaggattccattgtctggctgttcatagctcactgaaccagccactgttggagggcactagggcggtggccagctgttgccattacaggaagaaaatctaagtcacgtttgaaaacgcaaacagctcaggtgcccccagtgccagtcacgtgtccaaggcgggacccaggaatcttcactttcactggcagccccgtgcgatttcttttctgtcttcaatatgcatgatgtgatctgtctcacttctctttttgcttttgaaatcttcccagcttcctccgaaggagagcgaattgtataacgaatccccgtggacctggcgccagcccgtccactttgtaacccttttttcctaccttttacttgtggaccaagtcaagtcacttatgttgagagcacgccaggttcggaatccggtcggttgctagctcgcactctcatctaactggcttcttcagcccttgcgttttgtatgaactggtcgttggatcgaaagcctcgatcggaatcaggatgggattttgattgtgttcttgttttgtgtgttcatttggttggttttttggcaagaatctatctaagtgccgatgcagtctgtcccaagtgtgataggaggcatcatggaggtttgcagggagaggcgtggtccgtctgttgcgggagaagccgggagccttgctgacccctctcctcctcctccctccctggcagtgcaaagagccgtctcactcttctctctgaacgacccggccctgagcccggacatcccgcctgcacacagtcctgtccacagccacctgagcctggagaggggacccccgacccccaggaccacccctaccatgaggtgaggtttccctgggaacacccgggttcataccagcggcaggcctgtgcagtggaagaggcttacccagagagaggcagccatgtgggtcacccccaccactctccgggcggaagctgatatagcagctactcccccctcctaacagacttggaagtcattacactgcacctgtctgtgcactggggatccacagtgaccaagacagactctgcccagtcccaacagatctcccagtccagcagagacgacacttgaatcaatacacacacagttgtttcgcttccaactttgaacactgctaagcaggccgggcgcggtggctcacgcctgtaaacccagcactttgggaggccaaggtgggtggatcacttgaggtcaggagttcaagaccagcctgaccaacatggtgaaaccccatctctactaaaaatacaaaaattagccgggcgtggtggtgcgtgcctgtaatcccagctactcgagaggctgtggcaggagaattgcttgaacccgggaggcgaagcttgcagtgagccaagatcgagccactgcactccagcctgggccacagagggagactccatctcaaaaaaaagaaaaaaagaaaggaaagctgctaggcagtgtctcccaatcccccagccctgtgcctctcgtcagccccgtcgctgccaatctcccgcctgtctgctccttcgtctcctcctctgcagattcctaaacctcacagacttctgcctcacgctcacccttcccagcctccctgccaggtgccgtgctgggctgtctgaggacctagtggcaactgaggccaggcctggccctcaggaagcttcacgggggaaggaagaggacggggacagatctctcacatttgtcatctcacgcgtggcttctcacattcagcgcagcatatttgactgcactcacttggcagaaaacaaaattaaaaagaggcagagagaatgtaaatggcacattctgcctgtacatggatttaaatagtgcatttcacactcgtctgcacacctcacggttcagggttctatatacaaccatccgtgcactgtacttcatgggcagtgggagcaatttttgagggtaattttgacttcttgcttttcacactctggcttcagaactcaacctccaccacgaacgtaggccccactgtaattacaagaaatcagcagttccagatggtgctgctgggctgaggggcaggagcagcatgggctgtgggaagcagcgggacctgtggcccctgggcggcgctcctggagtccatttgcccccatctccctctgcagctgcagatccccaagactcagcagcaaggttgtaggaaagggtgggcgaggcaggagggccagcccccgaccgccaccgcctctgtgcctgtgcacgcacggcatccagtggagcctccttcagccccaactccaagcaggaaagggctgcgcgttctctgcagcggccaggcaggcccagggctgggaggatctgcagaggggcagctactggccatgggcccctgattcaaatcctagcaccagcacgtggtagccatgcagcacctccaaaggccacagtgggcagaggagctctgtgagatgagccgggcagtctggggcttgttgcggggtggctctcagtgacggccacgtggtcagcatcactgccaggaccattgttggtcctgcccacaagggcaggtccttttgaccatctgtccattctcgtgcttcctgtgcctggacccgccaggtgctcagcaggtgtctgtagagtgggctctttgtatcctggaggtacgaagaaggggtcctccctgaagtcacatgcacggcccagcctcagggaaaacgcacacttaagggtgggcagccacccttcccctggcctggtgctcctaacaccccgtccacatccacagaggtgcccttggtgggtggagtgtgccgggtggagggctggcttcctgcttcccctcagagcttctcctcaggctttgctagaatgtcagggataagggggcctgtacccccaggctcctcagatgtgggccagaagccttccccaggggctttagggcctcaggctgaccttgtccctggtttttccagcgaggagccacccctggatctgacaggcaaggtgtaccagctggaggtgatgctgaaacagctgcacactgacctgcagaaggtaaggccgggggccacgccctctccatcccacttcccagacactgggcagggcagtcagcagggatcaggcacctgcccccgccatgcaggacccaccccacccccacacctcctgtgtttgagtgtagtcatgggtgaagagtaaacagtgataacaccccaggctaccaagcgctcagagaaactcatccattcttggggggagaataatcagcccaggcttttcggaaggcaattggataacatttatcaaaaaaacacaaaaaaactgtggctgggcgcggtggctcatacctgtaatcccagcactttgggaggccaaggtggtgggtcacctgaggtcaggagttcgagaccagcctggtcaacatggtgaaaccccatctctattaaaaagtacaataattagtcgggtgtggtggcgggtgcctgtaatcccaggtactcaggatgctgaggcaagagaatcgcttgaacccaggaaggtggaggttgcagtgagccgagatcatgccactgggctccagcctgggcaacagagcgagactccatctcaaaaaaaaagaaaaaaaaatgttgatccagtaattccacttgtgggaatttatccgtgacagcatgggtacaaagagattgtgaacaaggacgttcgttgccacactattggcaataaaaaattggagccagcgtggctgtcactcaacatgagaatggctgtgtaaattatagggtgtccatgcagcggaacagcttgcagccaattaaagtaataacaaatctatatatttactaacacgcaaaagaagtccagtaacttacataaaaaccaaagcgagctgcagcagtgttgtctagaatatcaccatacttatttatttattgtttaaccaccatggttgagagggccatctagaaggtgacagtcaatttgttctttggacttgtctccatggggcggaaggatgaggaggagactggctgggtacgttggctcacacctgtaatcccagcactttgggaggccgaggtgggtgaggtcaggagttcaagaccagcctggccaatatggtgaaaccccgtctctactaaaatacaaaattagccgggtgtggtggtgcacgcctgtaatcccagctacttgggaagctggggaggagaattgcttgaacccaggaggcggagattgcagtgagccgagatcatgcctctgcactccagcttgggcgacaagagcaaaacccagtctcaaaaaaaaaaaaaaaaaaatgaggaggagacttttatctattgtttctatacttctgggtaaaagccagaaaggtggcagagtatataatgcgtaagtcttcgagccgtggaatcaaaggggcccaggttctgacccccgccccactgcataatgctgcgcaacctgaaacaggtccctgcctttcgggggctacgtcctcctggaagaagggggtctgctcaggccaccctgcatccatgtcccagctccccacttgctgtgtgaggctggggtcctcttccaggaaactagggacagcgacagtccccaagtcctcgggtagtgtgaaggtgggatgcggtgacaatagtgatgtttgtcaagcgatgactccacatgtggttgcgttccgggagctctacatagatgagctccagacacccctcagcctcctggtagagttgcgggaaccaagtgacttgcccagggtccctcggttgtggagaggcagagtgggatgtgtgccccggcctggcctggctctagtggttggctccaaagcacagccgggccagggctcacaggcctcagggagccatcggctgttccaggagcggccaagcccacccgcctgatgccagcttcccaccctgtgcaggagaagcaggacaaggtggtgctccagtcagaggtggccagcctgcggcagaacaaccagcggctgcaggaggagtcgcaggccgccagcgagcagctgcgcaagtttgcggagatcttctgcagggagaagaaggagctctgaggtgggaggccgccgcccgccttcgctccttcccctcaggccgtggccctgctgcctctctccctccactcagctcccagctgccggtgtgaccaagatgacccatccagggccctccccatggacacggaaactccgatggcctcactagggctgtgagtcagggtcagcgcgcacagccctcatgccccagagggcgaagtggtctcaggcctccctccaagctgcccagctgtggtcccggtgagctgggctgtgcttacaccgctcccgggcctgccccgctgtccccatctagcctcttcctgggaccagcccttcgaagctgatggggacggagagaggagccagtctccagacgcctcggctccaggaggtcacacagcaggtttctgcaccacgcacaacaaagttgcggcttgtggggccgaggcccctgcatgaaaagtacagcgtgaaagcaaccctttcttccccacacccagagaggtgaggcccgcgtggacacagaccagggcgcctcggtccctagcacgtgagctccaaaaagcacgaacatgatcccctccctaaccccctcctcccaaaaagcagccaggagcactttcttagagtttaaattattttcttgggggcctgaggatagagagaggcaaggctagcctccagagccgatttatttgagagagaaactctatttggatctccaggacggtttatacgatctttttctatcagctcctcttccgccagaggccactgcacctgggctaggggtccacaggcccctccaccttccagctaaccaggccaggccggggcggtggagccaccacacagccgactctctcctcctcctcccggcacgacctggccctgaccagcagcctcggcctcttctgggttccaggaggggctcccgaagccctcaggacagggctggaggagaacagccttcatctcctcctctggtttttttttcctttgcaagtctcccagcccatctctccgagcagcggccaccagaccccctcaccatgctccccggggagcactgcaccccgcgaaccccactggacgctggttctctaaaggcaataaggggcggccatgccggtgtggtaccacgctgttcctccaggaaaccgtttctttttttccttctttaaaagcaaacagaaaaagatatatatatatatatatatatatttattttttcatgtagagttggcgccagaacaagcctgtatggccacagtctgtggattcatccccccaacctcaagctgaggaccaaggcgtgtcccctgtgggctgggggtcagtgggaggaccagagggatgaagtcagggcaggccggtgccctttttgggaggcaccaggcggggaggagttggcggagcaggtctggctgtgagccagcaccaggcaacccggcccttgtccagggacctctgctgccttctctctggggtcaggaacctcagaggagggggctctggggactgcataggacgcaggcactcggaggtgccggtgtggatgggtgggggtgagagaagagggttcttatcgcgtctcctgtgatcagcctctggccccctggaggaggaaacctcagcgctgcccctgcccccaccctcacccccaacaccaagagtgaggtgggcgtgccccaggcagcgtcctcagccctggccagctactgtgatgccatcttctcccccatccccttctctggggggcccacccgtcccccacccccaccccttagaccctcatcgggtccctttttttttttttttttcagttgtctcctcccatcttcagatcattcgaatcattttggggacttaatcatgtacatggacaagtgtaaattatgatttttggttttgttttctgttattttttaaggatttctgcaaaaacagatctatttaatttgaggttgatgttctatccaatggccgaagatagcagcaggttttttttttcatatgttgatttgtttcatttggattttttttttattattctttattgtcttttttttttccccatccctgtcttgagattttctggcatgtttctggaggtttcaaaggaaataaaggtttcatagaaatggcttgtgtgttcacttttggggcagctgcctggagttgctgaccagagggtgtggtccagcatcggcccctcctcctgctcctgtccccaaatcccccacaccatgaccaccacacacatgtcctaagaaccaggggcacctgccttgctaacttcttttccttggaatccaaaggacagaaatccaacactcagaatgtgaaatgtccttaagttcaaaagagtgagattctgcctcagaggtcatatactggaggcctgaaggccagccccagcccagagggttgtgttgggtcttagaaatagtggccaacttttaatctggacattcagccaggtgcagtggctcatgcctgtaatcccagcactttttgagaggctgaggcaggaggattgcttgagcctaggaattcaaaaccagcctggacaacatagcaagatcctacctctaaaaaaacctttttttttttttttttaactttttttcgaaacagaaactctgtcacccaggctggagtgcagtggtgcaatctcagctcactgcaacctccacgtcctaggttcaagtgattctcctgccttagcttcccgagtagctggaattacggggacccggctaatttttgtgtttttgtagagacgagatttcaccatgttggccaggctggtctcgaactcctgacctcaactgatctgcccacctcggcctcccaaagtgctgcattacaagtgtgagccaccgcgcccagcttaacttttttttttaatggatattgcacatgaggaaggccaggtttccagcttggttgatctgtcctttgctgcaagactcacaaggggcccctgcctcctttggccctggccacatggctgcatttgggacactcttcccccttctgtctgtagaggtgggagcagacccctgctgccacttgccaagtgaatgctttgggggtagaaagcagcccctgatcgccccagatctgcatctggcctggtgaacatttgcattttgggaaccgggatcaaactggtttctgaatcaggaaattcctcctgaaaatcccgaagtccagccccttgagggaagcctagcctcctgacggggctggccaggtggggtctttctgcctcccttacccatgtacctgtcgtggagtttcacatctctgagctaaaacccagtgcttctctgactcagaccctgccccctccaaaaaatgtctttttccaaaaggcgtggggctggcatccggaggagcaggaccagccattcccacatctcctaaaaattctggagttctagacaccctccctgtctccgccctcctcctcctcgaggccccgtcctcaacccgcactgccctccccccgccaccgggcgaagggggcgggaagcctgggaacaggctgttctcacatcctctcctggcgccggagccacgccagctgcttccagcaccccacaactcgcgcgcacgccagcccctggtcgcgcccaaactgtgctttgaggcccggcccttcccttcgtgtcccagtttccagcttcctctgcccgtctcggacatccctgtctctcctccccaatctttctgggtccctcatacctccggctctctctgcagattgttctgctgttcccctaaagtctgtctccttctctcccctgccgcccgcgtctctccccatctctgcctgttgtcctgggactttgcctgcccctgatcccaagtctctctctctccacccgcaatgtggctccctctcactcttccctctcctgatagatgttacctccttctctgcctcccctcttggaggacctctccctaaatctgctgctgctcttccccaatcaccgtcctccttctcctcctcccgtctctcccagcatgtcagctattttttattagttattccctctctgccgttaaacctccttctcacccctgctcccttcctctctcctggtccttcctcctgtctctctcccttctgcaccctcttgctcttttttctgattctctcaataactgtgtgactgtcctcgtctctttctctctcctgatctgtgtcctagttccctcactcctcactcccgccccccacccgtcgcccacatctcagtctctctcccagtgcccgtgtctagataccctcctgccctcccttagcgcctctctttccaccttatcgccaccgctgatttgccccacatccaggacacggagccccctggagatgtctgggtctgggatgacacctcctgacacccccgttccccaccccagcctcaggaggggccaacccaccgtcctcttcccagcccttcccttcccccggcccggctcccgcctccctcccggctgcgcccgctgcagctgcagcagcccgttgccagggcaaccacagctggctgggcgggagcccctccaccccatcccccttctcctcctttctggcaaagcagggcggagctgggacaaagccggggagaggcagggtgcaggcaggggaagaaggaggtggatggaggtaggggctggctggtcgcctcacccccaacaaggcccgtcgacccccggtcctccttcttggtgatgccccaaaccagacgggagaacgaggcagtcgtgggcagaggggtcaggcccagtttaatacacagaacaagttaattcacagcagaggcaggcaatagaggagactcggtgacaagtgagggggcactcctggattaggggacatccccccaaaacccaccacctcccccacctgcagtctcagtttcccttttttaaaacccgaacaacaaacacacacaaccacaagaaacaaccacgccccctcactcccccaaaatggccagcgaggggggcgggggccgccaggcctggcggggcgggaggagggagagaaaaggagtccgtggcggagtctgtgcttctcattccagcaggcgctgggcgggggcccacccggccccaccaccgccacccaccagccacggcaggcacggggcgggcacaggctggggcggtcggggaggggcaggaacagagttcaaaaccaaggttcacatcatgcagtatccaccgtgggcaccaggaggggcgggtggacaccacgcccaccgccctgggcacaagaggggaaggcgcccaccttgggtggggcgcgggacggctgcagctccagaaattggggttggggcgcccggcggggggccggcagaggcgggtgcccggtggacactctcagcagcgcccctccacccagccaggccttggaggactctttgtatatattaacttcttttcttttcttcttttttttttttttaactttttgtctttttctttagaaaaaggctctgtccatgcccctggctggcacccaccaccccccatgcccgcccagaggcggggtatggctttgaggggagaagcccctggtgtccatttgccaagggacagagagggagggagggagggagaggccctggccgggcccacccacccacagggcagacattccacttgcacagaggggagggggtggcccagccccctctcggcttccccctctccccctccccctgcgggatgttcagggtgggggagaattgaggagctcggagaggcaggtaggcgagcaccaccccagagtcgcggcgagccgagccggcctaggtgagggtgatgtaagcagaagccttttccttcaggtgccggagacagaggtgacagctccagctccctgcgggggcagccgaagctgaagtcaggcccgggtccgggagggctgccccagccccttcccaccccgaggacacacagtcttccacaaccaggagatggcgttcccacccacccgccccatgggatgcccacctctcctctcaccttccgggggctccgccatggggggactcaggcagtacatgtggtaaccccgatcgcagtcatcacaaaacagcagctggtcctggggggtgagacccgcccagctggcaccctgggggcacgggcaccagaaacgggggtggggggctggggcaggggctaggtcaagggggctgggggaggtgaggccttccgagaaaggttctgagaaggtctttgcagcaggaaatgtgtgcgcaacactgcttagccaaacacatatccctcaggacagtccctttgcgatttatagtgggggttttataaggctctgtggaaggcttattattattattattttatatttttagagacagggtcctaccctgttgcccaggctggaagtgcggtggtgcagtcacagctcactgcagcctcacactccttggggctcaagtgattctcctgcctcagtctcctgagctgggactacaggtgtgcgccaccatgcacgacttttttttttttttttttttttttgagacgggagtctcactatgttgcccaggctggtctggtctagaactcctgggctcaaaattcctcagcctcccaaagtgctgggattacacaggtgggccaccgctcccggtctgtgggaagtttaaatgacaccaagatgatctgatagcagctctgccagaaacggtcatggcttttgtttttgtttgttttttttttttttgagacggaatctcgctctgtcacccaggctggagtgtgcagtggcgccatctcggctcactgcaatctccacctcctgggctcaagccattctcctgcctcagcctcccgagtagctgggattacaggcacccagctaatttctgtatttttgtagagatggggtttcaccacgttggccaggctggtctcaaactcctgatctcaggtggtccacccacctcagcctcccagagtgctgggattccaggcgtgagccaccgcgctccgcctgtggaaggctttaaacaaccctaagatgatctgataccagctctgccagcagtggtcatggctttaaatctcagctctgccatttccctagctggctgaccctgggcaggtctctttccctctctgagctcagtttcttccctgtgaagtggaaacaagaccacctgcttcagagggtggttgggaggatccagagagatgaagaggaaaaagggccaggttcgatttatggacaccggcataatgataacacaggggactggtgttcaccagggaaggctcaggcacaggctttaggcttaaggggcagaggtggacgtgccaggcggggcgggcagcagggcacgcggggggcgggcggcactcacgtcgttctcggaggttccgcacaggctgcaggatttgcactcgatgcactgccagcggtaggtccgcacggctgccgtcatgttcaccgtgaattgtaaacacgaggggtgtcctgggggccaaggggcaggggtgcagttaggaggtcaccgtgcccctggtgggcactgaccggcaggggagccatagctcagcccctacccctggctcatgacgccaggatgagctgccgggatccacagcctgaccccacacctgcccagcaaccacgtggccggcagcagtcccccggccaccacagtctcctaccacaaccaccatggcaaccacactctgctccccagaacgccatggcaaccgcattccattacccacagtgctgtgccaaccactttctaccacccacaacaccgtggcaaccacattctgttaaccaccgtgctgagacagccactttccattacccacagcagaacggccaggggtcctgttaaccacagcaacgtggcaaccacactctcccagccacaatgccatggcaaccaccttccacaacggggtccccacacttcggtttcatgcaactgaagtccattccacttggtgccccagcaacaaaactgttactcacatcacagcactgtgcagcgccaggcttagtcattccacagccccgctgcagagacacccgcagccgctacctgcagccacgacccatggcgcccgccccctgcaaccacggccccggtgccatcacaactacattccattatactgagttgccatgacaaccatatttcactacccatgatgccacgacaaccacaattcatgacctactgtgctgaggcaaccagagtctatattgcccacaagcccaccatgggaaaccacattctgttaaccacaactctatggcgagctcatcctgctaccggtgcccaggtggtggtgtccgtcactcacaccacacagcccactacctgccatgccttggcccctgtctcttgctactccttttgtcttgttttggtttttgaaacaaggtctcactctgttgcccaggctgcagcatagtggcaccatcacagtgcactctgcagccttgacctcccaggctccagcgatcctcccacctcagcctcccgagtagctgggactaatggggtgcgaaactatgcccagccttttttttttttttttttttttgagacggagtcttgctctgatacccagggtggagtgcagtggtgcaatcttggctcatggcaacctctgagccccgggttcaagcgattctcctgcctcagcctccggagtagctggaactacaggcacgcaccaccacacccagctaaattttgtatttttatagagatggggtttcaccatgttggccaggatggtcttgatctcttgacctcatgatctgctcgccccagcctcccaaagtgctgggattacagatgtgagccacatcacccagcctggcctattttttttttaatagatgggctctcattatgttgccctggctagtcaaaaactcccagattcaaggggctgggtgctgcggtggctcacgcctgtaatcccagcactttgggaggtcaaggcaggcagatcacctgaggtcaggagtttgagaccagcctggccaacatggtgaaacccccgtctctactaaaaatattaaaaattagccaggcatggtggcgggtgcctgtaatcctagctactcgggaggctgaagcacaagaatcacttgaacccaggaggcggaggttgcagtgagccaagatcatgccaatgcactccagcctgggtgacagagggagactctgtctcaaaaaacaaaacaaaacaaaacaaaacaaaaaccttctgggctcaagcgagcctcccacttcagcctcccgagtagctggggctaatggggtgcaacaccatgcccagctaactttttttatatatagatgggatctcactatgttgcccaggctggtctcaaactcctgggctcaagggagcctccggcctcagcctcctgagttgctgggattacaggtgcacaacaacacacctggataatttttaaattttttgtagagatgggggtcttgctatgttgctcaggctggtctcaaattcctggcctcaagtgatcctcccacctctgcctcccaaagtgctgggattacaggcgtgagccaccacacctggcctctcactactcttgatgccatgctaagcacaggcagctacccacagtgccatgagagccacatcccattatccctaaagcctcactgatccgacccaattcccacaatcctcagcagttgcatcagcctcgctagctctggttatccacagtatcccctacatgctccgggtcccctcggtcctcaccgccttgcctccctccctccaggtctgcactcctgaatgtcctctgcacccggcccccagaaacctcaggtggggagcatcacctgatcgcccacagtccgcacaggagatgaggtcctcgggacaccccgtcttcttggagccccccaggcagaagtcacagtagccgttggggatgacagtgccgtcgggcgccttcttggctgcaagacagcagacaggcattggcacggggcaggcaagggcaccccgcaaaggtggctgcagactttaggagcagaaggaggcatccgtacctgtgtgtttcctttgtgcctcagggacccaggccaattctttgtaaaactctggggtaggggggacagagagagggactctcaccacaggcaaggctccaccctgcccccagcctcagccccaaggatggacctcttagtccaggcgtggggagctgggaagagtgagtagctaccccaagctgtggggagaggtgaaaacagttctcatcgggactcccaactctgcctttttaaatttttttttcaattaaaaataaaggcagggtcttggtatgttgcccaggctggtctccaactcctggcctccagtgatcctcccacctcggccactgccacaaagtggcgggattataagcgtgagccactgcacccagccaggattcccaactccttgagacaactgacatgtcctctttattgggtcaaaacttggtagacagcttgaggaagggctccctgcctcccttctcacatacatgtctcccagccagccactcccaactgcaccctcagtaatttgtatctaacaaattcagcgagtaccccagccaagatctggtatggaaacagacactcggaagaaaaactccgaacactgaggtgcgtgggtgtgtagtggccaggggtgaagacactcagcctctgcctctgagagataggtgggaagacagtgtctccctactgcctctcccaaaccctcctcccctcccccatccttcagctgtcagaactggcatgggattggcaagggcggaagccaagggctcccaggccacagaccctgccccttgaccaaagcttagcagagaaaggagaaagggaaggcagggcgggaggggagccatctatcaccccccctccccaagctctaattgaaacaataaatcagacccagaaatattacgcccggccaggagcgaaggagcgatggttggttgccatggcaaccccggagccagcatccccatggtcggtggggggagggaacggctgagctggagattttccagaaatgtctaatgcccccccacccccacccccagctgggctcctcttccccactcccagggcccctggccacccccacctggcctgccagctcacgtttatggttgtttttccggtggaagggcagggcgtggcgttcggcgttctcctccccctcctcctcggccaggtgggtgtgggtgtagtggtagctgagccccggccggttcttataccgtttcccacagactggggagcgagcgagccaggagggcctgtcagcccctccgggcccctgccgcctccaccctggcctccaggatcacacctcccccctcagccagagacctgagcagcctcccaacccgggtctggaacgggagggagagggccacgaggtggggagtctctgggcacccctctctctgcctttccccctcttcagaaggactcactatcacagacatacggcttgtctcggtcctccagggaagcggtgtcctggcgtttccggagacccccgatgccatatgcctgtggggagagtcaggagtgaggggccaagaaagtgagaaaacaggccaggcgtggtggctcacacctgtaatcccagcactttgggaggccgaggcaggcggatcacgaggtcaagagatcgagaccaccttggccaacatggtgaagccccgtctctactaaaaatagaaaaattagctgggcatggtggcgcgtgcctgtagtcccagctactcgggaggctgaggcaggagaatcgcttgaacccgggaggcggaggttgcagtgagcagatattgcgccactgcactctagcctgtgacagagcgagactccgtctcaaaaaaaagaaaaaaaagaaaaaagaaagtgagaaaacagtgtcttttgcaaattcaaattgcagctgtacaaatgtcctagctgtggggccttgaacctctccaaggttcagcttcttcctctgtggcatggggatgaaggtagctctaacccactgcataatctctgctttgcaaatggcttaatacagatgagcctcagtttcctcatctgtaaaatgggtataaaatcccccacccctgcaggccgctctggggattcaatgaggtcagactgaggtcagactgtggcaggggcggaccactgcacctgctccatgaatgagacctgtcattgaggggagcggggaagaggagaagcttggggtgatacctttcctttggccctgttcttcctcctgggaatgtcatcctccaagtcttccacctcgaggtcatgcggaaactccagcaactgctgtttctgggcaatagagaaaggagacgggtcaagaaagtgggggccactgacctgcttttgaggggctctgggcaaaggtggagattgggggtgagagtataagtcaggagttcttccaaatagagatgaagtctgggaggatggtgactgggatgcccaacagccagaagaaaccgggggggtttcagagcaggaacgtgagggcccgggctggtggcaggcaggggtgagacgaagccatgcagcgggggtcccccagaggtgggcccacctgacagtccataatggtctcctcctccttcagctcaatcttcttctcccccgtctctgcacacagtagagcctcgaggaccggcccttccgggaggccaccctccttcttcaggggtgcttcacagtctggggacagggccatgggggggtcagatggggaagttgaccccggaggactcctcaaactatgcaggtggggggaccatgctctttgcaggagggaagaggctgcagaggcaaggatttaaccacatgccctaggagggaggcccagactctggggagacccagtcacgccctcagatgccctgggatgcacagcaggagacacggtcagaactttggatacaccagaaagcctcagaaaaagacacagttaggccatcaggcacacccagacctactcagggaagacacagcgactctcaaacatacccagacaaatatggacagatccagacactcgcagaggagacacagggacacccgcaggggacatccagacagatcgtctgagacagatgcgggaaggaagaggcccagccatgctgtcttttttcttttttttttgagacagggtctcgctctgtcacccaggttggagtgcagtggcgcaatctcagctcactgcgactcccaggctcaagtgatcctcccacctcagcctcctgagtagctgggactacaggcagagtagctggcatgctaccacactgggctaatttttgtatttttggtagagatggggtttcatcgtgttaatcaggctggtctcaaactcctgagttcaagcgatcctctgcctcggccttccaaagtgctggaattacaggcataagccacactctcagatacagcctagagactcaaagaggtatagccagatccttggagacacccagacacagggaggagacatagctggacccatgggtacactcagaaatgctcagagacaattagctggccaggcgcgttggctcacacctgtaatcccaacactttaggaggctgaggcgggtggatcacttgaggtcaggagtttgagaccagcctggccaacatggtaaaacctcatctctacttaaaaaaaaaaaaatacaaaaattagccgggtgtaggggcacatgcctgtaatcccagctactcaggaggttgaggcagagaatcacttgaacccgggatgcggaggttgcagtgagccgagatcgtgccactgcactccaaactgggtgaaaaaaaaaaagaaaggaagaaggaaggaaggagggaaagaaaagaaaaagaaagagagagaaagaaagaaagaaggaaggaaagaaagaaagaaaggaaggaaggaaagaaaagaaaaagagagagagagaaagaaagagaaagaaagaaagaaagagaaagaaagaaagaggccgggtgcggtggctcacgcctgtaatcccagcactttgggaggccgaggcgggcagatcatgaggtcaggagatcgagaccatcctggctaacacggtgaaaccccgtctctactaaaaatacaaaaaattagctgggcgtagtggcaggcgcctgtagtcccagctactcgggaggctgaggcaggagaatggcgtgaacccaggaggcggagcttgcagtgagatcgcgccactgcactccagcctgggcgacagagcaagactccgtctcaaaaaaaaaaaagaaaaagaaaaagaaaaaagaaaaaaagaaagaaacaattagccctccagatacacctagaccctggggaagacacagccagatgagatgcttggacacatagcggggagataccgacatactcagggagaatcactcagctagatacacacaaacacacacaggagacagacaggaagagacacagccaggtgggcactgccacgctcctgggtacacacagaccctcggactcaggaagagaaactgaccccgaggatcccgatattcctaaacacattcaagggtaagtccagatcctctgatggactggcacacacgtgcagaaatacacctgatacgccagacaccatcaggaagattctcccagacactccgaggcacccacacacccacagaaagagacggccgcaccgcctaacacacccagacacactcgggaggagccggacaccctgacagaccagacatacacaagacacaagccttctaagacacttggagacacctgggaagatacacctaagagaggaaagagctccaaccagacactgagacatccagacgcccttggggagatacagaggcagacaccctcaggcacccacagaaaaaaatacaggcagatggccgggcatggtgactcaagcctgtaatcccagcactctgggaggccaaggcaggtggatcacctgaggtcaggagttcgagaccagcctggccaacatggtgaaaccctgtctctactaaaaatacaaaaaaattagccgggcatgtcagtgtgcatctgtaatcccagctactcaggaggctgagacaggagaatcgcttgaacccactaggcggaggttgcagtgagctgagattgcgccactgtactccagcctgggtgacagagccagactccatctcaaaaaaaaaaaaaatacaggcagactgatccatcccagttcccaggggaagggacacagtcagcaactccatacacccacacacacctaacagatatcactatgccctccaataccactgggacccttggtggggcatggtggttcacgcctataatccctgcactttggagggctgagacaggaggatcccttgagctcaggagttcaagaccagactgggcaacatagtaacaccctgcctctatttaaaaaacaacaggccaggcgcggtggctcacacctgtaatcccagcactttgggaggccgaggtggccagatcacctgaggtcaggagttccagaccagcctgaccaacatggtgaaaccccgtttctactaaaaatacaaaatcagccgggcatggtggcgcatgcctgtaatcccagctactcggaaggctgaggcagaatcgcttgaacctgctaggcggaagttgcgggttcaaggttcaactccccgctaggtggaggttgggggatcacgccattgcacgccagcctgggtgaaactctgtctcaaaaataaataaataaataaataaataaataaataacaacaactgggcacctgggcccatgtaggaggagatgcagtcgccactcagtgactcagagaaactgtggaatctctgggaaacacccgggacgcacatgggcagacagacacacagccagccaggcagacacttgctagaaggcgataaaggtgatggacgagtgctaggacacacagcaggcgctgggacaccgatgggggccccagcggctgcacccaccgatcttgtactcgcagggcctgagtctggggtcctccaggatgttgagtctccgtttcttcctccaacagcgggcggggtacgtgtaaatctgtcccggggccaaacctggagagagaggggggtgagagggcggcggcggtggggcggcctggccccgccccgccctgcgccagccctcccggcggtacccggcccgcggtgggtcttctccatccagatgtagcagttgttctgggccacgccggtctgcgagtcgaggaagggcagtcgcaggctgcgctcggcgcacaggcgcgcgttgtaactgcggcagtgctcgatggcctcgcggtagaagtcctcgcctaggctagaggggcggcgaacgggcgggcggctgtcagcaagggcaggcgcacagggtcgcccagcaccccttccccggctgccgggccgcccaggctcgggaggggtgggccgacccctccagcctcacctctcccctcctcccactccgggacccaggctgggggaaggggacagggcccaggggcccccaaactgggactcaaacaggcccccagctcatgagtagaaacacgatacagaaacaaacaaaaacacaccgggacgtatccctacctgaacacatgcagacacacaacacaaatcacacacagtcacacgggattcacacacaaagagagacaaatcccaatactcacaaaggagaaacagacaaacctcacacacgtgcacacataaatatctactgaaaaagacaaatatcccaagttccatagtgtggagacaaatcacacaaataaccatgcacaaagacacatcacatatccacagacacacaccagaaacacatcacccacacaaagacacacaacatggaaacatcacaccacacacacatacaccccctcatgcatccaaagacacaagcatgtcaaaagacaggaactacagaaaccacttgcgcccctaggcacttacccatgtatccaaagacacaacacaaaccacacacacaatatccagacacacaacacaaagaaatcacacagattcacacaggtacacacacacatttacaaagatgcacgatgcgcaaccagtatctaaaatatcacacatccacacagacacacacacatataaaacacagaaacagccaaatccacccatagtcacacaaaaatttacacacaaatacacgcagccctacatacccaaaaacacagaacacaagacaaatgacatatagttccaaaggacacggacacacactgggagacccaaatatccaaagatatctagtgcagaataaaaggaaacagacacatgtccacacacctatcccccaaaaattcttaaaaaaaccagaacacaaataagtgatacacacacacactccacatcccaagacaaaggtagtgtggacttcactccagttgccaaggcccccgcacccccgggtcatttcagtctctcccagacccgagggttgcagggaagggatgatgtctcccttccccaaaaagaatctggaggccccccacgccctccaccccgccagggagcggtgcatccgacaccattcttgtcagagacccacagtcacacactctcgcacccccgcgcagccccgcactcggtgacagccccccagacaccccttcggccccacccccggtcgccacacacacacaggcccgcgtagacccgcccgcgcttcctctccgcctcccgccggcccgcaccacctcagggggccagggatgacagtggccatcttgctccccgggtcctgcccccagcaggtccccgccgggtcggtcctcccagcggtcgggcgggcgctgaggccgcccatccattcattcccggggggcgggagcacgagggccacggccaatcgcggcgacggggcgggcccgcccgggccatgctgggagtggtagtcccaggccagggggcccccgggaccccgcggggacgggacggcgcggaggaggggcccggggcacgcaccgtcactcacccgccctcactcgtccacatatcctgctctcgcgtgcacacaaccacatgcacacctggactcgcacacgcccacgcatggcagtttacacacacattcacgcggatactcacagcctcccacacactcctactcacacaccttcgcacggactcacacagccacacgcacacacactgcaatactaagagacgcagagacacctcccaggtgcccacacagacttctcaccaacatgcttccagcagacaccccctcaccgccccccacccaagtccctcctggctccagagaccccacccggggctgtctctcccagcagccacgctcacggtcaccccgccctgctcaacgccttctgcaggcctgacagcagcagtgcaggttagaaacagtagtcacacctccagggttcaaatcctagctctgccacttggtggccatgtgaccttggcaaatgacttaacctttctgggcctcagtttcctcatctgtaaaaagaggatgatgcctcactggagtgttgtgaggattaaatgagtaaatataggtaaagcattttaagaggtgactggcaggccaggcgcagtggctcacacctgtaatcccggcactttgggaggcccaggcaggtggatcacctgaggatgggagttcgagaccagcctggccaacatggtagtagtctctactaaaaatacaaaattagccgggcatggtggcgcatgcttatactcccccactcaggaggctgaggcaggagaatcacttgaactcaggaggtggaggttgcagtgagctgagatcgtgccattgcactccagcctgggcaacaagagtgagactccctctcaaaaataaataaataaataataagaaagaaagaataatgcggccaggtgcgatggctccagtctgcaatcccagtacttcgggaggcctagatgagagcactgcttgagcccaggagtttgagaccaacctgggcaacatatccagacccctgtgtctacaaaaaaaaattaaaattagctgggcatgatggcgcagcagtgtagtcccagctacttgcaaggctaaagtgggaggatagcttgaacctgggaggctgaggctgcagtgagctgtggtctcaccactgcactccagcctgggtggcagagcgagactctgtctctaaaagcaaacaaacaaacaaacaaacaaacaaaaaactaagtaagcagggcgccgtgactcatgcctgtaatcccagcaatctgggaggctgagatgagaggaccgcttgagctcaggagaacagcctgggcaacatagcgagacctggtctctactaaaaaaaaaataaatagctgggcatggtggcacatgcctatggtcccagctactcaggaggctgagtcaggaggattggttgaacccaggagatcgaagctgcagtgagctatgatcacaccactacactccagcctggacaactgagcaagaccctgtctccaaaaaaaaaaaaaaaaatagatgctcagtagatatttgttgaatgagtaaatgcacccatcatgtgctgggcacagttcaccccgggatgcttttattatctgcattttccaggtgaggaatctgaggcacaggaaggtaacctcacatgcccgcatgccctggcggctctttgaaggtaagactgaaggaaggaggcaggcacccctgacggccctccccaagtagtcctgacctccttctctctcccactgtcacccacactgactccacccgaagagatccccagggagtgagcagacccactgagtcacaaactgacccagtctctctgcaacaccaccaccccgtcccccctcccgtctcacccctcctccccctttccccttcccaccccttctccccctttccccttcccctcttccacccggacccctgtagagccagcattcaaatttgggcggctgctgtaattaacacgcccacaaacgccctcatccaccagggggcgccccagccgacagaagtggcccgctagccttcaccatttttgtcacttgaaatccccccaagagagagatccagtcaaggcctcctacactcacggtcacttctacacacacacacacacacacacacacacacacacactcctctagtcttagaccctttccacaaactcgcccatctaagccaggtaaggtcttggccggcccctctcctggaacaggaggtaggtctctgattcacatatggcctggagtggtgacaaggggattaagtgaggggcactgacacccctacgatcactctggcctccagggccctatagtggccacctcacaccttacccacggtgagctgtgaccccaccttcctctctcacctcccattagctcacaggtcccgtaacacaccctcttacacttgattcccacaccgctagcctcagacacgcagactcactcctgccccaccccaaactctcatgtcgatttgattaagagaagcccgagtgtagacactgagtgcagaccttcctaacagtcctcctctaccagcagaatttctatttttctttcttttcttttcttcttttatttctcttccttccttccttccttccttccttccttccttccttcctttctttctttctttcttttcttctctttctttcctctttctctttttctcttttttttttttggacagcgtctcactcgatggcccaggctggagtgccatggcatgaacacagctcgctgcagcctccacctcccaggctcaagcgatcctcccacctcaaacccccaagtagctgggactacaggcctgtgccaccgcacccggctaatttttgtatttttgtaaaaacagggtgtccctgtgttggccaggctagtctcaaactcctaagctcaagtgatctgcccaccctgccctcccaaagtgctgagattacaggcataagccaccatgcccggcccaccagcaggatatctacccacagacgcaggctgacacttgcagcgggctctcctttctttccttctgccctaaccacctgcacacaccactcccacatactctcctacacacttgaactcccagtcctctccctggcccaaacaatcctcctgccccatcccccaatgccctgtgtgggagctggcccacagtagaaatcaatttcataaatcaatattgatactactaataataatcactacatttggtcagtgtcagtctctgtgctaactgctttacaaagatggccttagccccacgacagtcccatcgggtggtaagggctgttagaagcccccatacacagatggcaaaactgaggctcacggcagggaacattcgtggctcaagctggttttggaactcaggcagtcggaacttccgagggcggcaccctgcagctccttctccccaggggatttgactcacattctttcaggagccagggagtccccaccttcacccccacagagaccttttggaagggaagggcacagaggggtagggccctcccagtccaggcttactgtagctgggcccctgctcacggctgtagcacacctcctcccaggggtctgggccagggtcagggtgaggggccccatcgcctgtagatccaccaacctgcacaagagccccgttcccagccattttgcggatgtcccctcacaggagagacagctgtctgtgtgtgccacttagggtgagagggcagcagaggggtgtcaccatcatacaccacctcacacggacccgagccccacacacccgctcccggcaccctgctcacggcgaagccacacgtgtaggcgcttgcctctaagtccctgccccccttcctctcccaactcccaccctccacctcccacccccattcccgccagaaaccagaagcaactggcggcctctggtccagccagcaggcgcatcccttctcgtgggtggggtaggggggcgctccctctctccctctctccccccaccccccacccccgcccccagccctcgatgttcaaggtcaaggcagccagcgcacggggttgggggaagggtgggggaggtcgccccggcccctttgtgcgacgccgcgggcgctcgccctccgcctcctccaccaggcccgggaggagggggaggggagcgcctcgctcgcctgcggggagggagggcgggagcggccgagtgcctgtcacttggagcccgctgtcaccgcctgggaacggggggtggggagcgctgggacgtggagtccgggatcccgaagaggaagcaagagcgagatggagagggggaaggggaggtgtggagagcgcgagggatggcaaggagaggagagggtcaggaggggccaggctcggacccaggcttccggattcccagccaccgggcccgggaagaggcgaacgctcggaggaccgcggccagggagaaagggagggaatccccggagaccgagggcgctcccggcaccccctcctgggcagccggtccccaaagggatcagagatgctcccgtttgatgtgtatgcgcggggagagggagggatgccgcggtccagactgacggcgggttcggggcttccagttcccgggatcccgggaggaaaaaggggaggcagcggggatggaactggggacccccgacgtctcagctcccaccctgcggccgcgagggccggggtcctcagagaaagaaggggaaagagagaaaggcgctttgatgagcggagagcgggtgatggaaaccctggagaccgaggtccggacttaggtgttcgagctttcagccccggccggggcaggcccggcacctccggagaccctgagggagagatggaggagagggaaacccctacccccactctgggtggggaaacggcctccgccacccccagcccgcgccgcattccttcactgacagcgacaaagaagaggcgcccccgcgaccctggaggggctcccgcccccaaccccagggggcgacagggggtggggacccccggggcaagggttcgcgctgggggcccccattcaactacggtccgcgcgctgcgtccccctcctcagccccagggcgggcgggggaagggctcctggtgggggggtctggacagggggcggggacggcagggacactcacgacttgagcgggttctgaatggcggtggccatggcccgctcggctgggccgcctccggcccggggcgccgctgccgccgcgcgcgggcccagcccggcctgcgccgcccgctctgccgcccagcgcgctacgatttcattcattcttggggctgcggcgcgagcggagcggggcgggccgggggcggggctcagccaatccccgcgcctcccagcgcacgacgggacgtggagtctaggggcgcgcggcggcgcccgagggcgcccctgcccggactacacgtcccagggggcgtcaggaggaccgcgctcccattggctgctggggatacagggaggggcggggctccccccagagcatctttcctccctccctgggagtgctcggtctccaactcgggatctccaccctccaggcaccgcgggcgcggaagcaggtggtccctagcttctagatgtccccagggtatgtggatgaccctagggtctgtcgtgtattcttgtctaggcctatttgggtgtctcttctatgtcggacagcctgtgaacaagcacaggggttaatcagtgcctttgttcatttactgagtgcctgctgtgttccaggaactcttctaggcactggggatacagcaatgaccaaaacaaagttgccgctctcaaggagctgacattctagtggagaaagacagataataagaaaataaatagataaaatcatttcagacagtgaaaggtgctataaagaaaagaaaatggggccagtcgtggttgctcatcactttgggaggcctgtaatcccatcactttgggaggccaaggcaggtggatcatctgagcttaggagttcaagaccaatatgggcaacatggcgaaaccccgtctctacccaaaatacaaaaaattagctgggtgtggtggtgcatgcctgtagtcccagctactcaggaagctgaggtgggaggatcacttgagcctgggaggcagagattgcagtgagccgagattgtaccactgcattccagcctgggtgacagagcgagaccctgtctcaaaaaaaaaaaaaaaaaaaagagagagagagagagagaaagaaagaaaaagaaaaagagaagagtccaggcacacacctataatcccagcactttgggagcctgaggcaggaggattgcttgagccccatagcacaagaccagcctgggcaacatagtgagatcccatctctgcaaaaagtttaaaaattatctgggtgtggtgatgcatgtctggagtctcagctactcaggaggctgaggcaagaagatcacttgagcctgaaagttggaggcagtagtgagctccagcctggacaacagagagagtctccgtcaaaagcaagaaagcaagcaagcaagcaagagaaagaaagaaaaagaaagaaaagaagaaaataaaatagattcagcagaacacagattccagaaagaaaaaagaagcaaataaaagataattttaaaaaaagaaaacagattgatttgaaggagtgaagaagtggcttctctgaagagatgacatttgagctaaggtctagaagttgccagcatgcactaagaagcatgtctaggcacaggatcaccaagtgcaaatgccctgggctgggaacaagtgtggcatgttcaaagatcaggaagcaattgagtgtgactggagcagagtgagcagggggagacagcctggggagagagcaaggacccggctcatgtagtaccttgtaggtcattataaagaaaatggattttgttctaagtgcaatcaatcatcctgaactctccttctcctcttctttttcgcacacacactccaagcccatcggcaaattctgttgtctctacattcaaaacatatccagattccacccactctctgcacttcatggcctgcaccccagtcctgtccatcattgtctgctgcctggactatggtagcagcttcatcactgggctcctgcccctcaagtctgctctccccacacagccagagcaggctatctgaagcatatctctgtgctgagcacagtggctcatgcctgtaatcccaacactttgggaggccaaggtgggtggatcacttgaggtcaggagtttgagaccagcctggccaacatggtgaaaccccatctctactaaaaatacaaaaattagccagctgtggtggtgcatgcctgtaatcccagctactcggaaggctgaggcaggagaatcgcttgaacctgagagacagaggttgcagcgagccaagatcgcactgctgcactccagcctgggcaaaagagagattccatctcaactaataataataatgattaattaattaagcatatatctgcatccaaccactctctggctcaaacctccagcggcttctttcataatttgaataaaatgcaaagccctcgctacgccctcctccatccctcctcaaccctcatcacatttctggcctctttcacctccttccttcccttggctaacttcactccagccccactagcttcctccctatttctggaacattccaatcccactccagccacaggacctttgcacctctgcctagagtgctcctcccacagacacctgcctcactccatcccgcacttcattcaggtctccggttaaatgccacctcctcagacacaaccctagctaaaattgcagcccctagcctcctgcctcagcctcccaaagtgctggggttacaggcgcgagccacaacacccagccaaaattatgaataaataaatgtattggccaggtgcagtttgctcatgtttgtaatcctagcactttgggagcccgaggcgggtggatcacctgaagttaagagttagggaccaactggccaacacagtgaaaccccagctctactaaaaatacaaaaataagccaggtgtggtggcacgtgcctgtaatcccagccactcaagaggctgaggcaagagaatcacttgaacccagggggcggaggttgcagtgagtcgagattgtgccacttcactccagcctgggcaaaagagcaaaaaactccatctcaaaataaaataataaaataaaataaatgtatcaattagtcatgctccatgcctctccccagtgtccaaaagcatgcacccagcatgaagagaatcaggtgggatccaggctctgccctaccccatatggacacttggacaacctgaagtgaggggcaaatttggggccttttttaaggaaaagtgcccagcacagcatctggacctaaggcttcaaggcagagagaagggatacattaaaaggcacacttggccgggcgcggtgcctcatgcctataatcccaacactttgggaggccgaggagggtggatcacctgaggtcaggagtttgagaccagcctggccaacatggtgtaaccctgtctctactaaaaatacaaaaattagccgggcgtggtggcgggcgcctgtagtcccagctattagggaggctgaggcaggagaatcacttgaactcaggaagtggaggctgcagtgagctgagatggcaccactgcactctagtctgagcaacagagtgagactccatcccaaaataaataaataaataaatgtcacatccactcatttctagagaacgatgatggtctccatccctctgtggatgtgctggggacacagcagcaaataagatggccccagactttgccttaagcttggagtccagaagagtaacagactcatcaccagacagtgatgtccagaggggtccaggtggggttaggggacacaggcagaggggtcggggctgggacaagggggacacaggcagaggggtctgggccaggattggggagcacaggcagaggggttgggtttgggacaagggggactcaggcagaggggcccaggtgggatggggagcacagacagaggggtccaggtgggatggggagcacaggcggaggggtcggagctgggacaagggggacacaggcagaggggtccgggccgggattggggggcacaggcagaggggtcggggctgggacaaggaggacacaggcagaggggtccgggcagggattggggggcacaggcagaggggtcggggctggagcgggggagacacagggcactgtgggagcccagaggcggctgtctcctggcctagcctgacagtcagggatgccttcctggaggagaggacacccggcctgcatgtgaatccttttgagtcctgaccccctgatctacccagacacagggcaaggttcctgctctgacctcttggggccttaatgcctgatcttcttaatgcccatcactcaagctttgaggaacaaaccctaaaagtctcaacctgtggtcacttctcctaaccctggaacccaagggtttgcccaccagagggcgctgtggccccagtctttgtccagcagaggctgcttcggaagcctcagatccgggagacatcctgcaggccatggggctgcccgcagagacactgggcccccaaccctgagcctcagaccctgcccaggacctggtcaccagggtatctccctctccttctctctctcacacacacacgcctctaatccaaggttccggtggacctggaatcacagaaaactctgccccatacccactgggtccagctttggcctctgaaggaaatgcaactgctaacagccacttctcccctctcctgcccgctacaattcagaggaagccttccctaagtggcccttgggatgttcagatgtacctttcagaagtttcctgcccaggcccagtgcggtggctcacgcctgtaaccccagcactttgggaggcggaggcaggcggatcacctgaggtcaggagttcaagaccagcctggccaacatggtgaaaccctgtctctactaaaagtacaaaaaataactggctgagcatggtggcaggtgcctgtaatcccagctactcaggaggttgaggtaggataatagcttgaacccaggaggcagacactgcagtgggctgagatcatgccacctgcactccagcctgggcaacaagagtgagaccctgtatcaaaaaaaaaaaaaaaaaaaaagtttcctgcccagatggggatgctgaggcgcagaagaggtggggctggggggccatgcagtatcagggcagcaacagtaataatcgtaacagcaaataaagactcattggttcagctcctcctgagtcaggacctgtactgagctttaacaagctacacacatcactgaatcatacagaccacacttgggaagcaggcacccaaatgtcagcaatgagctgagacgggaagccctcaaccttcatggcagggagaagtaggattcgaacccagatctggttgggtgtggtggctcaagcctgtaatcccagcatcccagcactttgggaggccaaggtgggaggattttttttttttttttttttttttttttttgcttgattttgaaacagagtctcactccgtcgcccaggctggagttcaggggcgccatctcagctcacttcaacctcctcctccttggttcaagtgattctcctgcctcagcctcccaagtagctgggactacaggcatgcgtcaccacatctgactaatttttgtatttttagtagagatggggtctcaccatgttgggcaagctgatctcgaactcctgacctcaaatgatccacccacctcggcctgccaaagggctgggattacaggcatgagccaccgtgcctggccaggaggattgtttgagcccaggagtttgagaccagacaaggcaacatagtgagaccccatctctacaaaagattaaaaataaattagccaagtgtggtgaggggcacttatactcccagctattcaggaggctgaggcaggaggatcactggagcccagcctgggcttctgaaggagacatgactgctaaggtcgaggcagtagtgagctatgattgtgccactgcactccagcctggggtgctgagggagacttgacacagacaggagagtgagactctggctcaaaaaaaaaataagaaagaaagatatatcaggctgggagcggtggctcaggctgggcacagtggctcaagcctgaaatcccagcactttgggaggccgaggcaggcggaccacaaggtcaaaagattgagaccatcctggccaacatggtgaaaccccgtgtctactaaaaatacaaaaattagctgggcgtggtggcacgcacctatagtcccagctactcgggaggctgaggcaggagaatcgcttgaacccaggaggcagaggttgcagtgagccgacattgcgccaaggcactccagcctggcgacaaagcgagactccgtctcaaaaaaaaaaaaaaaaaaaaagggaagggaaggggaggggagggaagggaagggaagggaagggaaggtctctctgattattggtggggatgcagactgtggaggcaaaggggagagcagagaccagggaagtggtgccaagatgggtcagaggggagggggagcaacagtgtgggtatgagaaagggatgggaagtaagagaatgtggctgttatatgaccaccaaagtggtggcctaaaacaacagaaatgggcgggcaagggtcatgcctggaatcccagcactttgggaggccgaggagggcagatcacttgaggtcaggagatcaagaccagcctggccaacatggtgaaaccccgtctctactaaaaatacaaaaattatctgggtgtggtaatgcatgtctgcagtctcagctactcaggaggctgaggcaagaagatcacttgagcctgaaagttggaagcagtagtgagctatgatcacaccactgcactgcagcctggacaacagagagagtctctctctaaaaaaaaaaaaaaaaagaaagaaaagaaaaagaagaaataggttcagcagaacacagattctagaaagaaaaaagaagcaaataaaaaataattttaaaaaataaaacagattgatttgaaggagtgaagaagtgtggtggcggatgcctgtaatcccagctactcgggaggctgaggcaggagaactgcttgatgaacccaggaggcggaggttgcagtgagtcgtgatggagccattgcaatactttgtctcaaaaaaaacaaaaacaaaaacaaaaacaaaacaaaacaaagcaaaataaacagaaatgtattctctcacagcgtagaggccagaagtccaaagtcagtgtcactgggctgaaagcaaggtgtgggcagggctgtgttcctttgggaggctctgggggaaaatctgttcctctccaattccagcttatgggggctgctggcagtcctgggcttggccacatcacgccagtcttcaaggccagcatctccacatctctgctctgcctacacagcaccttctgtctatgtcaagtctccctctgcctccctcttaaagggcacatgtgatcatttttggaacccacctagataattcaggagaatctacctcccctcaggtcccccttctttttttgagacaaagtctcactctgtcacccaggctggagtgctgtggcaccatcatagttcactacaggcttgacctcctgggctcaagcaatcctcccacctcagtctcccaaatagctgggaccacaggtgcacaccaccatgcccagctttttttttttttttttttttttttttgagatggaatcccactctcgccaggatggagtgcagtggctccatctcggcttactgcaacctccacctcccaggtccaagcgattctcctgcctcagcctcccgagtagctgggattacaggcacatgccaccatgcccagctaatttttgtatttttagtagacacagggtttcaccatgttggccaggatggtctcattctcttgacctcgtgatccgcccacctcagcttcccaaagtgctgggattagaggcgtgagccaccaaacccagctttttttttttttttttttttttttggagagagagtgtctcattttgttgcccgggctggttcaaactcctgggctcaagtgatcctcccacctcagcctcccaacaccctgcgattacaggcatgagctaccgcacccagccagatccccatgttaagatgcttaactcaatctcatctgcaaagactctttttccttctacggaactaggatctctttggggaggcatgattctgcctccctcagcagagtggacagaatctgagggtggataatttacaaatctgactgtggagtgtcaagaatgaggatgatgccagggtctgtaaccagagcaatcagaggcccctgagacggggccgcatgagaaaggggcaggttagggagaggccaggagatccagaggtgttgggtctgagatgcgcatcagacatccaagtgttgttgctgggtgagtctgaaggtcagagaagaggtcaggctggagagaattttggaagaccattgatggtacctaaagtcatcttctccatgcaggcattctccccaggggagctcactcagccttctcactttaggtaacatcaacagtcttccaaaagttggagaccccggctggccagcattgacaggagagagagtgaggaggaaccaggtgagaacgaggccggagacagaggaggcaggaggtgagaggaggccagagacagcggccctgtaaagaaaacattcaggctgttggccgggcgcggtggctcacgcctgtaatcccagcacttggggaggccaagcgggtggatcacaaggtcaggagttcgagactagcctggccaatatggtgaaaccctgtctctactaaaaatacaaaaaattagccgggcctggtggcgggcgcctgtagtcccagctactccagaggctgaggcaggagaatggcgtgaacctgggaggcggagcttgtagtgagccgagatggcgtcactgcactccagcctgggcgacagagcgagactctgtctcaaaaaaaaaaaaaaagagagaaaacattcaggccggcatggtggctcaagcctgtaagcccagcactgggaggctgaggtggaaggatctcttgagccaaggagttttcaagatcagcctgagcaatatattgagaccctcatctctacaacaaataagaaaattagcagggcatggtggtgcacgcctgcagccccagctaccggggaggctgaggagggaggatcacctgagcctgggaggtcaaggctgcagtgagccatgatcacgccttgcgccactacactccagcctaggcgacagaatgagattcttttaaaaaaataaatataaggccgggagtggtggctcacacctgtaatcccagcacttcgggaggccaaggcagatggttcaactgaggtcaggagttcgagaccagcctggccaacatggtgaaaccctgtctctactaaaaatacaaaaaattatctgggcgctgtagcagacgcttgtaattccagctacttgggaggctgaggcaggaaaatcacttgatcctgggaggtggaagttgcagtaagccactatcgtgccactgcactccagcctgggagacagagcaaggctccgtctcaaaaataaataaataaaataaataaacattttataaaaagaaagcagacgggcgcggtggctggctgggcgcggtggatcatgcctgtaatcccaccactttgggaggccaaggcaggtggatcacaaggtcaggagatcgagactagcctggccaatatggtgaaaccccttctctactaaaaatacaaaacttagctgggcatggtggtgcgtgcctgtaatcccagctactcggaaggctgaggcaggagaattgcttgaaccagggaggtggaggttgcagtgagccaagatcgagccactgcactccagcctgggcgacagagtaagactctgtctcaaaaaaaaaaaaaaaaaaaaaagagaaaagaaaagaaaatattcgctgggcacggtagcttatgcctgtaatcccagcactttgggaggcctaggtgggtggatcacctgaggttgggagtttgagaccatcctgaccaacatggagaaacccaatctctactaaaattacagaactgccgggcgtggtggcacccgcctatgatcccagctactccagaggctgaggcaggagaatcacttgaacctaggaggcagaggttgcgatgagctgagatcacgccattgcactctagcctgggcaacaagagcaaaactccatctcaaaagaaaaaagaaagaaagaaagcattcaggggagtgggagccagtgttgcaccggatgtagctgagaggtcaagacaagcaggaggtgtgatgttggacccaacaccatggggaccccgacaagagcatttccagagtaggaacagcaagatgtgaacatttgattggaaatggtgtaagagagaactgagaacgtctcttgtgagaaattttgctgtaaaaggaaacggagaaatggggctggagctggaggaagtccagagagtttttgttgtgattttgttttaatgtggaagaagtgacgatgtgtctgtgtgcccgtgggaatgagtacgtgggggctggggacctgctggagcaatgaccttcaggaagcaagagaaaatggggaaaataggccaggcacggtggctcaatttgggaggccgaggtgggcagatcacttcagcccaggagctcgagaccagcctgggcaacatggcaaaaccccgtctctacaaaaaaaaaaaaaaaaaaaaaaaaggtagccgggcatgatggcacgtgcctgtaatcccagctactacttgggaggttaaggtgggaggatcatctgagcccgaggaggttgaggtttcagggagccatgatggtgccactgcactccagcctgggtgacagagaccccatctcaaaaaagaaaaaaaaaaaaaagaaaatgggggaaatccccaaggggggtgacgttagagacagctgatccatcccaacaggacccaaaagcacttaccagcacagaagccaggaggtggggcagtcggcaggagacgagggaattagggtgttctcttctagtgaagcttgtgagcaaggatggggaaaggagagagacacacttggaaccctcactatgagcaagggaggtatggagcgtggctcccaccccagtggacgcctggaggggagggtcaggaatttaaagtgaaaacttgtgtttcctccaaccatgctaaccaatgagggcacacacttgcagaagacagagagttgccagcactttgggaggcctaggggggcggatcacctgaggtcaggagttcgagaccagccaggacaatatggcaaaaccccatctctactaaaaatacaaaaattagccgggcatggtggcacacgcttgtaatccagctacttaggaggctgacgcacaagaatcacttgaacccggaaagcagagattatagtgagtcaagattgcgccactgcactccagcctgggcaaaaagagtgagactctgtctcaaagaaaaaaaatacaaggggaagggaatgagacaccaccttttgatgggagagtgagaaataatttggcatgtcacagtgatattctcttccattttccataatcaactccattggtgttttttgttgttttttttgtgttttttgagacggagtctccatctgtcacccaggctggagtgcagtggtgtgatcccggctcactgcaacctccacctcccgggttcaagcaattctcctgcctcagcctcccgagtagctgggattacaggtgcatgccaccacgtcctgctaattttttgtattttagtagagacggggtttcaccgtcttgcccaggctggtctcaaactcttgagctcaagcaatccacctgcctcggcctcccaaagtgctaggattacaggtgtgagccactgcgcccagccaactcaattgttatactctacatttaggtctttattctatctggagtctatttttgtatgtgctgctacatagggacactttagtaggattatttttaaattttttaaaaaatttcaatagttttggggtacaggtggtttttggttacatggataagctctttttttttttttttttttgagatggagtcttgctttgtcacccaggctggagtgcagtggcgcgatctcggctcactgcaagctccgcctcccgggttcatgccgttctcctgcctcagcctcctgagtagctgggactacaggcgcccgccaccatgcctggctaatttttttgtatttttaatagagacggggtttcaacatattagccaggatggtctcaatctcctgacttcgtgatccacccgcctcggcctcccaaagtgctgggattacaggcgtgagccaccgcgcctggcatggataagttctttagtggtgacttctgagattttagtgcacttgtcactggaagagtgtacactgtatccagtatgtagtctttatccctcaccacctcccaaccttccctgccccaagtcccagagtccattatatcattcttatgccattgtgtcctcataccttagctcccgcttacaagtgagaacatacggtttgtggttttccattcctcagttactttacttagaataatggcctccaaggctgggcgcggtggctcacgcctgtaatcccagcactttgggaggccaaggtgggtggatcacatgaggtcaggagttcgagaccagcctgaccaatatgatgaaaccccttctctactaaaaatacaaaaaaattagccgggcgtggtggttcatgcctgtaatcccaactactcaagaggctgaggcaggagaattgcttgaacccaagcggcacaatctcggctcactgcaacctccgcctcctgggttcaagcaattctcctgcctcagcctcccaagtagctgtgattacaggcatgcaccactacactctgctaatttttgtatttttactagacatggggtttcaccatgttggttaggctggtctcgatcgcctaacctcaggtgatccacccgcctcagcctcccaaagttcatctggaattttgatgaagattgctgtgggcgggcacagtgggcagcagcgagacttcgtctaaggaaaaaaaaattaggtgtgatgacacgtgcctgtagtcctagttacttgggaggctgaggtgggaggatcacctgagctcaggagtttgagggtgcagtgagctatgatggttccactgcactccagcctgggcaacagagtgagaccgtgtctcaaaaaaaagttctgcccatcaaccaatgagtgcataaaggaaatgtggtacatatacagccgttaaaaggaatgaaatcatgtattttgcagccacttggatggagctggagacattattcttttttttgtttgtttgagaggaaggtcttgctctgtggcccaggccagagtgcaatggcaggatctcggctcactgcaaactcttgggcagatcatgaggtcaggagttcgagaccagcctgaccaacatgtcgaaaccccgtctctactaaaaatacaaaaattagccgggcatggtggcgcgtgcctgaaatcccagctactgaggaggctgaggcaggagaatcgcttgaacccgggaggcggagattgcattgagccgagatcatgccactgcactccagcctcagtgacagagcgattctcagtctcaaaacaaacaaacaaacaaaaaccacttcaagccgggcatgatgcgggtgcctgtagtcccaggtactcaggaggctgaagcaggtaggatcgcttgaactcaggatttcgaggctgcagtgagctatcatagtgctgctgtgctccagcctgggcgacagagcaagacccctttctaaaaaaaaaaaaaaaaaaaaaaaaaaaagataagatatgaaaacaaaacagccgggtgcggtggctcacgcttgtaatcccagcactttgggaggccgaggtgagtggattacctgacgtcaggagtttgagaccagcctgactaatatggtgaaatcccgtctctactaaaaatacaaaaattagccaggcatggtggcgcgtgtgtagtcccagctactcaggaggctgaggcaggagaatcgcttgaacctgggaggtggaagttgcagtgagccgagatcgcgccattgcgctccagcatgggggacaagagcaaaaactctgtctcaaaaaacaaacaaagaaacaaaacagaaaaagtaaaaaggagaaacgaaaattaaaaaaaaaaaacaaaacaaagaaataaaataaaataaaaccaattcacatagccacgagggggcgctgaggcctcacgtccacacgtagagggctgcggtgcttggagacaacgtggccacctgggagtacggttcttgggcaagcgcctactgtgcgcccggcgccgttctacacaggaacacagcgcttttcaaggtaggcgaggagctaatattctgaagatggtggtggggggcggtgaacagacaatagaatagacagaccagagtgtaatatttttttttttgagatagggtgttgctgtgtttcccaggctggagtgcagtggtgcaatcatagctcactgcagcctcaaactcctgggctcaagcaatactcccacctcagcctccagagtaactaagaacacaggcatgcaccaccacgtctagctaattttattttttgtagagacagggtctcccctgggctggtctggaactcctggcctcaagtgatcctcctacctcggccactcaacgtgctaggattacaggcatgagccaccacgcctggccaataaattctataaaaaaataaataaatcagcagggcacggtggctcacacctgttatctcagcactttgggaggccgagacaggtggatcatgaggtcaggagttcaagaccaggctggccaggatggtgaaaccctgtctctactaaaaatacaaagaaattagctgggcgtggtggcaggtgcctataatcccagctactcgggaggctgaagcagagaattgcttgaacccaggaggtggaggttgcattgagtagggatcatgccactgcactccagcttgggcaacagagtgagactccgtctccaaaaaaattaaaatcaatcaatcgatcgatcggtcaagtgacaggatagtgactgagggtgctccttagattaggtgctgcagaacacctctctgagatgacatctacatgatggtgaggatgagagaaacacggggagaactgcaggcagaggcaatgtggccacgggtcatggaggggccggtaggtgggtctgaggacgggagagaagctggtgtgggtgagggtcagacagcagagggctgaaggcaggaaggtgacagggcgcagtgtggccaggaggactaccaaggaaaggctgtgaaaagtggtgactgtgaaaagtggtgacatgaaatgtcttcaggatgggttttaattttttatttatttagtttttttgagacggagtctcgctctgtcacccaggctggaatgcagtggcgcgatctccactcacggcaagctccgcctcctgggttcactccattctcctgcctcagcctcctgagtagctgggagtacaggcacctgtcaccacgcccggctaattgttttgtatttttagtagaggcggggtttcaccttgttagccaggatggtctcgatcacctgaccttgtgatccgcccgcctcggcctcccagtgttgggattacaggcgtgagccactgggccctgcctccccgccccccgccccgagacggagtctcgctctgtcgcccagactggagtgcagtggcatgatctcggctcacttcaacctctgcctcccagattcaagcaattctcctgcctcagcctctggaatggttgggactacaggcatgcaccaccacatccggctaattttttttttctgtatttttagtagacacggggttccaccacattggccaggctggtctcgaactcctgacctcaggtgatcctcctgactcggcctcccaaattgctgggatgacaggcatgagccagcacacctggcccagggtaagttgttaaatggccggcaaggtgtctcacgcctgtcatccctgcactttgagagactgaggcgggaggatcacttgagctcaggagtttgagaacagcttgaccaacatagtgagacctcatctctacagaatatttaaaaattatctgggcatagtggtgcacacctatagtcccagctatgtgggaggctaaggcaggcggcttgcttgagcccaggaattagaggctgcagtaagttatgattgcaccattgcattccagccggggtgacagagtgagactgtctctaaaaaaaagtaaaattaaaaaaagcaaagagtaatgttcggaatgtctgccttgttggtacaaaaggggtgactagaacatagcttcacacttgtttgtatttgcagaaaaaaatattgcagtaatactaagaaattgattttctttttaaaatggtaacctttggaggaaagaggaagagagaacagggtggatggaggttagggtgagagtgagaaaaggcgttgtctggctgctgagtgggaaacggaccacagacggtgggaggcaaggagccagctgggtggggaggctagtgtggctacaaggcggggagggcggcgcatggtgggttaagtacactgtgtcttttggggctttttttttttttttgaggcggagttccgctcttgttgcccaggctggagtgcaatggcgcgatcttggctcactgcaacctctgcctcccgggttcaagctattctcctgcctcagtctcccgactagctagaattacaggcatgtgccaccatgctcagttattattttttgtatttttagtagagacggtgtttcaccatattggccaggctggtctcgaactcgtgacctcaggtgatccacccgcctcagcctcccaaaatgctgggatcacaggtgtgagccactgctcctggcccctttggggcttttctgtatctgaagagctgtggttcagtgttcctaagggacttcctgctggccagaaatggtgaccataggagctaatgatcagtcccctccttacaatgacagggttgataacagtgcttaccatgtgcctgggcctagcgtattctctgcatttaaacctcacaacaggctgggcgcggtgtctcccacctggaatcccagcactttgggaggccaaggcgggtggatcgctggagcccaggagttcgagaccagcctgggcaacatggtgaaatcccatttctacaaaacataccaaaatcagctgggcttggtggtgtgtgcctgtaatcccagatgcttcggaggctgaggtgggaggatcatttgagcccctgaggcagaggtagcagtgagccaagatcacaccactgtaccccagtgtgggtggcagagtgaaaccctgtctcaaaaaacaaaataaaacaaaacctcacaataatccctggaggtaggtactattaaaatcaccttcattttacagatgtggacacagacacagagaagttaggtgactttctcaagatcacacagctaggaagtgccacttgaatccaggcagtaatccaaaatccatgttcttaaccactaaccactgtggtgtgccgtttcccaattcttttcctttttttttttttttttttttttgagacagagttttgctctgttgcccaggctgtagtgcaatggcccaatctcggctcacggcaacctctgcctcccgggttcaagcgattctcctgcctcagcctcccaagtagctgggattttaggcaagcgccaccacgcccggctaattttgtatttttagtagaaacggggtttctccatgttggtcaggctggtctcaaactcccaacctcagatgatccacctgcctcggcctcccaaagtgctgggattacaggcgtgcaccgtacccggcccttttttattttattttattttttttttgagacactgcttcgttacccaggctgcatgcagtggtgtgatcgacctcctgggctcaatcctgtgaccttggctgggattagagacttgagtcaccccgcctggcctcccagtccttcactgtagcattgttctcagttaattgtattgccctttagattggttatctccacggattgcgagcaatcatgaagaccttagtatgaattagccaatattttcccatcactgaacaatagcaattgttgctgtggtttaaagggaccctgtagagcaggagttaaatagttgggctctggagtcataatgcctgggactgaagcccagcaccaccatttcccagccatgtgactttgaacaagtgacatccctaatctgggcctctgtttcctcatctgcaaagtacccattttccagatgaggatactgaggcctaacacacgcacacacaggactttagaacctgggttttgagcgcataccgcctccaccaggacaaggaacccaaacgagattctgtgagagggaagtagaaagggttctgcaggcccaagtggggtgttctaggacacgggcttaggagctgggatgtcagcaggagggacttgcccattctctatacagtgtggaggaaagggagcactggaagccttgggtccatctgcacagagacagcaaggtcacctgaacggctggacaggccagggtgctcctggatgctcctcctcaggggggtcttctcttcctcccagactggagctcagacacccgggataagtgcttaatcctggcggggccacttaatggcacaggtggggacagggccctggggccccaacttcagtcagtggaggccacgtgggagatgtactttgtccttggtgagacagcccagctctgaccctgccctggtcctaagcacggccacagccccaccccagctcctgattatacacacctgggaccactggtccaaccagaaccattagaatgtagccgtgccattaaaggccattaaaaggcctggcatggtgtctcacacctgtaatcccagtactttgggaggccgaggcaggtggatcacgaggtcaggagttcaagaccagcctggccaaggtggtgaaaccctgtctttactaaaaatacaaaaattagccaggtgtggtggtgcacgcctgtaatcccagctattcgggaggctgaggcagaagaatcacttgaacccaggaggcagaggtttcagtgaactgagatctcgccactgcactccagcctgggtgacagagcaagactccatctcaaaaaataaaataaaataaaataaaataaaatgttgaaatataggccaggcctagtggctcacacctgtaaacccagcactttgggaggctgaggtgggcagatcacttgaggtcgggagttcaagaccagcctggccaacatggtgaaaccccatctctgctaaaaatacaaaaagtagccaggcatagtggtgtgcctgtaatcccagctacttgagaggttgaggcaggagaaatcacttgaacttgggaggtagaggctgcagtgagctgagatcacaccactgcactccagcctggatgacagagcgagactctgtctcaaaaaaaaaaaaaaaaaaaaaaaatacggctgggcgcggtggctcacacctgtaatccctgcactttgagaggccgaggcggtcagatcacctgaggtcaggagttcaagaccagcctgaccaacatggtaaaacccatctctactaaaaatacaaaaaattagccgggcatggtggcgcatgtctgtaatctcagctactcaggaggctgaggcaggagaatcgcttgaacccaggaggcagaggttacagtgagccgagatcgcaccattgcactccagcctgggcaacaagagcaaaacttcatcttaaaaaaaaaaaagaaagaaagaaagaaaaaaaagacaatgttgaaatagagggctgggtgtggtgggtgaattgcttgagcccagaagtccaagaccagtctggacaacataaggagaccttgtctctacaaaaaagtaaaaaaatagccagccatgatggctcacacctgtaatcccagcattttgggatgccaagttaggaggatttattgagcccaggaggtcaaggctacagtgagctatgattgtaccactgcactccagcctgggtgacaaagtgaggctctgtctctaaaacaaaattaggtcaggcacagtggctcacccctgtcattgcagcactttgggaggccgagacaggctgataatttgagcccaagagtttaagaccagaccggacaatacggcaagatcctgtttcttaaaaaaaaaaaaaaaaaaaaaaaaaaaaaaaaaaaagccaggcatggtggtgcatgcctgtagtcccagctacttgggaggctgaactgagaggatcacctgagcctgaggaggtcaaggctgcagtgagccaagattgcaccactggactccagcctgggtgacagaatgagaccctgtctcaaaaaacaaaataattttttttaaacaataaaattaaaaaacataaaataaaattttttttaaaaagccactacccacttctgatggcccagctgctcccttgggaccctccaggcctctccatgccccagcatgaaaggattaacctgggttcaatagggggcttccctgatccagctctgggggccattgtccttcctgactggtggatggccctggcaatatttggtgttttccctggctctgccccaatatcaatccctccacccataagttcagagtcctcagagaagggtatccatttcacagaactcctatgcatccttcaaagcccaccttaatgccacttccttcaggaggccctcccagatttcttcaccacccccagagtgaatagctccctcccctctgccaagctcccaggtatcttgagccattcagcacactttgttctgattctcacactcaggcccttctccccccatagtgtgtgagcaccttgatgccagagaccatcttcctctcatctttgcagcctcagtaccaagggccattataagcacagcgcagatttcatggagtggctgaatgatttgtttgctgtgtgatcacctgtactgagtcaatatcggtcacctttggtcatgagcatgccccttgacccagattcctgcaggagcctgcatataggggccctgcttgctgggactggggatgggggtggggtggggagttcaagggaaggcaaggtctaggatataaatcccaagggcgtgggctcagcagggcccgttctcatgctttctggcccgggaggagtgattctccatctggcaggcccagctgcagtgctgggacagggacatgagcagaggccacaggaggagagagggaggttgtggggggagctcggggaagcccatggtaacccggggggaggaaaaacagccacacagtgttattgttacagaaccattaaatacaacttatacacaagcaagctgggcggcgtccggggggcagggagagtgcaagagggtcaggggtgagcagtccgggcccggtcctggagggggctgaggctgccgtcgtgggaggggcttggctggcggaggccgggctgcctgtggaggccttgaagctttgccagcagctcctggatgaagtcctgagacagggtgggggagctgagaacatgggaacagtgcgggggcaccctctgcccctgtccagcccagtccctgacctgggcgcctcctcctgttctctgattgtggggtggggggagttaggggcggaggctatagacatagagagaaaagtgagccgggagaaagacagagatggggaaagggcgatgggagggatggagagaaagagctaggaagagagatagagatccaaggagacagatacggagtgggggagggggagaaacagacacagaaacagagagacatgtagagatagagacagagagagacataaggacagagaaagaaacagagacatgtggagacaggtccccagagatagatccagggcgaacagaaatgcaatgacgtttgtccctagagctagttggagaaacatgaatagttttcccttttaaagcagggaaggaagtgggaggggttgggccgctcagcttcagggcctgggaggatggagggcccccagaggtggggaagggagcccggggtggcggaggcagtgacaggggaggacagagggagactgagcccgaaggctggtggccaaaggacaggcacaggagaggcaaaaacagggcagatgggggaggacagaatggagccccctcagcagatgggggagagagggagagagacaagtaggaggacaaaagacacccctggagaccagaaagagctgcggagggcaggttggggccgggggtggtggggccgggtggtgttccccagagacccttctgccagcttcttccccctcccccatcagagtacttggggccagaacagggagagaatgagggagagaaaactcacctcgacaggtttcccacatgacttcaggagtccctaaaacccccaaccaagaacaaaacaaaacagtaaatgactaacacctactcccctccagccccttccctttcccaaaaggccccagcagcaagacaaatggaagtcagactccagggtggactgcccaccaagcttcaagagaggaacagagcccaaggggcatgtggatcgactcagggcaggggtgagttactagatccagagagggcgagagggtcacacagcacttccctcctctaaaaaggtataagccataagcaaagacatggctgccaaactgcctgggttcgatgcccagctctgctccttctgagctgtgtgacactgggcaagggattcaacctctctgggcctcattttcctcatggggaaaatggagctcacactagcgcctgcttcggagggttttgtgagggttaagtgagtgaatacatgtaaagccatcacaccagtgcccggcatctagtgagcactcagtaaacacgtgaactattgctattatttttagggaggtgcaaagtgggaggctgggggacacgtccccccacctacctggattttccggcttctctcctcttcactctctaactccaacaattcatcaatgttgatctcatcgggcatgtctgcctcctagggccagggagggaggggtgcttaggatccccttccctccctccctcgcctttgtccagggctctgcaggagccccaccggccccagggcccagctggcgggttctggagcattaatgtggcagtccgggacagcactgccaagacgggacatctgggtgttgggggggaggggtgacagatgggctgagagagccccggggccctgtaccagcccgatgcctgggcccatgggccccgggagcctcggggctggcacgggtctctcgccttggctctagttcccacagaggaaaacaggcctagtggagtcctggaatgtcagattctgggattcgggagaggagctggcttctgccctttcaaggaaaagtcttagcactaggtgcaggggaggagaggctggcagccagcagccagctggggcggccccttcccccaggggacaggaagggaggggacaggaagggaggggacggcttgggccagcccccagagggccaaaatgcagcctggtgagaccgaagggaggaccaccgaggcccctcaaggtgggtgggtgggatgagtcatggctcaactcagctgctaagagcggggcgctgagtgtggcctctacaggcagtggcccaagcgcaggctggctcagtacccctgctgggaataggacccagctgtccccagctgtcgagggagcaagagagccttggggttatgaatcctttcctccccaacccaaagtccggctgtcggcttcaggcctggggcttcagggctggatggtcctggttcatgtgtggtgaaggggcttcagcaaggacacaggtgtgtgagtctctgccagggccacagcctgatgccaagggcctggggctggccgaggatgcagagggacctggcatcgtgcagtggcttcgtatagtggactgtggtcctgcaggtgtgaggtgtgtggctctggcttgggtgtgtgacacatcagcatgtgtccacagtcagctgtggggcccaccacctgagaatggcctcatagatgccacctgccactagcaaccagattggttcacctgtatgggcccaggtgtgagtctgagaacagagggactgcatgtcaccatgggagaagggccatgccttccaccattgtcgcaccatgaagaggaggactcgtgggtcctgtgtacactgtagcatacagaagtcacagaaggccaggcgcagtggctcacgcctgtaatcctgacattttgggaggccgacaagagagaattgcttgagcctaggagttcaagatcagcctgagcaacatagcgaggccccatctctttttcttttttcttttttttgagacaaagtctccttctgtcacctagggtggagtacaatggcgcgatcttggctcactgcaacctccgcctcccgggttcaagtgattctcctgcctcagcctcccaagtagctgggattacagctgcctgccaccatgcccggctaatttttgtaattttagtagagacagggtttcaccatgttggccaggctagtctcgtactcctgacctcaagtgatctgcccaccttggcctcccaaagttctgggattacaggcgtgagccactgtgctcggccaatgaggccccacctctaaggaaaagaaaaaagaagtcactgaaagtgtgacttcaagcagaaactcaagtgatgaagtacctgtgtgtgtcaatacatgtagctgtggcttaggctcttgtgtgcctgtgagcagcggtgggttctgcagttgtatgtccacctgttcctatagcttacagttttttgtttgtttgtttgtttttgagacggagtttcgctcttgttgcccaggctggagggcaatggcgggatctcggctcaccgcaacctcctcctcccgggttcaagcgattctcctcccgagtagctgggattacaggcatgtgccaccacacccggctaattttgtattttttagtagagacgggatttctccatgttgatcaggctggtctcaaactcctgacctcaggtgatccgcccgcctcggcctcccaaagtgctgggattacaggcgtgagccaccgtgcccggtgcttacacagttttatgtctgggtgtagttataaattctgttgggttttgtttgtttttgagacacggtctcgctctgttgcccaggctggagtgcagtggtgcaatcttggctcactgtgaccttggcctctcaggctcaagcaatcctcccacctcagcctcctgaggagctgagattacaagtgcgtgcatgccaccacgcccggctaagttttaagatttttggtagagacaggttttccccatgttgcccaggctggtgttgaactcctgacgtcaagcaatcctcctgccccggcctcacaaaatgcgtgagccactgtgctgggccaatttctgttgttttatgtctttgagtggctgcggatcagcgcttgtgcttgaaggtggtcagttttttctttaggagataaggaagggccgtaacttgagtcattttgtgttccagtggggttgtgctgtgtctgcctacggctgtggcccatgccgctgtgtctgcgggtggctgtgactgtagcatatgttgaactgtaggtgacccccccccagcccccgcttgtgtccttgtgggtttgtgcatggctgttacttctgggctgtgtccgtgagtggctatagcttccttcactgtgcacatctgtgtctgcttttgcttcctttgccgtgggtctctgtgtggctgtatctcccctgtcaccatgtctgtgtttggctttatgacaccccccttcccccactctttctccagacgtggcggtttcagctcaacttagcctcctccctcctcatgctaaacccctggccctccacaggcgtttggacacatctctggagacccaagtctttgtgtgttgctctcggtgtgtccacaagcacaatgccatagagcacggatggccaggccaatgagtgcccggccctggggcgctcgtcctcttgtgcagaccaggctggccgtgcaccagcgagtgtgcaccgagaccccaagggcgtggggtctccgcgcccgggctctatctgtccccgaccacccccgagccctccccgggctcaccatgccgcggtacagctcctccaggcgcccgtcgatccacttctccacgtccagccgccgctgcagctcccgccggtcatacttgacggtgacgcgcgcgtgccgcttctgcagccccccgggactgccccctggcccgcgggcccgcgatggagactgcagcttgctcagcacgcgcttgcccagccgctgagctgccatcgcgctgctggacccagcctggccccgcgctgtgcgccttcgcctcgcgccccgggtgcttcttacgggccagggcggggctagccgggggcgggggctcgggctcgccgggaggtctgccccaccccggccgcctcaggcctcagtttccccgtctgcagtgcgagagtaggccgctgcgtcggcttgaggcacgcagtcgtgcgaagttgaggtatgggcggggacccagagtcccgggcgggtccctgcatcgggggctcccgggccgggatcctgtggggcgggggcctgggacagacactcgggacccggcctgtctgcgccctctggcggtggcggggtggggggctgttggtgcgggagcgcctgcgccgctgtcgctgtagaaggtcgagcggtcacttgttccttcgttcattcattcactcatccatccatttgtttgttcactcattccgttcaacgaatttttttttttttgagtcgatgtctctctttgtcgcccaggctggagtacaatggcgcgatctcggctcaccgcaacgtccgcctcccaggttcaagcgattctcctgcctcagcctccgaagtagctgggattacagggatgcaccacaacacccggctaatttttgtatttttagtagagacgggatttcgccatgttggccaggctggcctcgaactcctgacctcaagtgatctgcctgcctccgcctcccaaagtgctgggattacaggcgtgagccaccgccactggcccggttcaacgaatatctattaagtatccactctataccagacactgctttacgctccagggatagagcagggaacaaaacagacaaaaccagtcccacgcagttgacagttgtagccgggatacatgagaaacacagtaagtacggtattatacagtttattatcatataagtgctttggagaaatataaagcagagaaggagaaatggagtgagggtaaggttgcaattttagcgagggtggccagggaagtcccttacttcaaaacagtcttctcacttctaattataagcagcaataattatactctaaaatttaaatgtggctgggcgcagtggctcactcctgtaatcccagaactttgggaggccaaggagggtggatcacgaggtcaggagttcaagaccagcctggccaacatggtgaaactccatctctactaaaaatacaaaaattagctgggcctggtggcacatgcctgtaatcccagctactcggaaggctgaggcaggagaatcgcttgaacccgggaggtggaggttgcagtgagccaagatagcaccattgcactccagcctgggcaacaagagcgagactctgtctcaaaataaataaataaataaaataataataaataatttttttaaaaaggccaggcatggtggctcatgcctgtaatcccagcactttgagaggccgaggtgggcagatcacgaggtctggaattcaagaccagccaggccaacatgatgaaaccccatctttactaaaaatacaaaaaaaaaaaaaaaaaagccaggcgtagtggtgtgcacctgtaattgcagctactggggaggctgaggcaggaaaattgcttgaacccaggaggcagagattgcggtgagccaagatcgcaccactgcactccagcctgggtgacagagcaagactccatctcaaaaaaaaaaaaaaaaattgtagagacagggtctccctatgttgcctaggctgttctccaattcctgggctcaagcgatcctcccacctcggcctcccaaggtgctgggattataggcatgagccacctcactccaccagccagccataatgtaaaacttttgagtttcaaagaacatcatcaagaaagtgaagagacaacccatggaatgggaggaaaaaaattgcagtcatgaaactcataaggtgctgggacgagccaccacacctggccaaactatacactttaaaaaggtgagttgggccaggcacagtgactcacgcctgtaatcccagcactttgggagggcaaggcggatggatcatcggaggtcaagagttagagaccagcctggccaacatggtgaaaccccatctccactaaaaatacaaaaattagctgggcatgggggcacatgcctataatcccaactactcaggaggctgaggcaggagaatcgcttgaacctgggagggggatgttgcagtgagctgagatcatgccattgcactccatcctgggcaacaaaagtgaaactccatctctaaataaataaagggtgagttgtatggtatgtgagttatatctcaataagactgtgtttttttttttttttttttttttttttgaggcagaatctcgctctgttggccaggctggagtgcactggcatgatctcagctcactgcaacctctgcctcccaggctcaagcaattctcctgcctcagcctcccgagtagctgggattacaggggtgtgccaccacgcctggctaatttttgtatttttagtagaaacggggtttcaccatgttggccaggctggtcttgaactcctgacctcaggtaatccacctgcctaggcctcccaaagtgctgggattacaggcgtgagccaccgtgcccggcttcaataaagctgttttatttcaaaattaaaaacaggccaggcgccatggttcacgtctgtaatcccagcactttgggaggctgaggtgagtggattatctgaggtcaggagtttgagaccagcctgaccaacatggtgaacccgtctctactaaaaatgcaaaaaaaattagccaagcatggtggtgcacccctgtaatcccagctactcaggaggctgaggtgggagaattgcttgaacctgggaggcggaggctgcagtgagctgagatcgtgccatcacactccagcctgggcgacagagaaagaccccatctctaaaaaaacaaaaataaaaaacaactatccatagctacccatgaccttcagtctaaaggccaaactctggtttagcagtcccatctctgccagggacagtcccatttcagcaccagcacctttcactcgcagttccctctgccaggaaggttcttccctagaatatcatcagggctcactccttcacctccctccaatgtcactgttcagtgaggtcttccctggccacgctatttcacactgcaactctcgtgcccctcatccagctctgtttgatacataacacttaccactttctaacattatatatatatatatatatatatatatttttttttttttttttttttttttttttttttttttgagttggagtcacctcaggctggagtatagtattgtgatcatggctcactgcaacctctgcctcctgggttcaagagattctcctgcttcagcctcctgagtagctgggactacagttatacaccactgtgtccgcttactttttatattttcagtagagatggggtttcaccatgttggtcaggctggtctcgaactcctgacctcagacgatctgcccgtcttgacctcccaaagtgctggaattacaggcatgagccaccatgcctggcctctaacattatatataatgtactcatttaatgtattgtccatgccaggcgtggtggctcacacctgtaatctcagcactataggatgctgaggcaggaggagcaattacatccaggagttcaagatcagcttgggcaacatagtgagaccctgtcgctacaaaaaaaaaaaaaaaaaaaaaaagccaggtgcaatagtacatgcttgtagtcccagttactctggaggctgagttgggaggatcacttgagtccaggagatggaggacgcagtgaactgtgattgcaccactgcactccagcctgggtgatggagtgagaccctgtctcaaaaagaaaaatgtcatattttctgttctgtgcagtgacagaaaaaaaaaattattgtctgtttcccaactagtagcatactaaaggcagggggacaggactggtccactttgggtacaggcaaaaagagggtgcactgtctgtagagaatttaaaaataaaaagctgaccaaggccgggcatggtggctcatgcctgtaatcccagcactttgggaggccaaggcaggcagatcacctgaggtcaggagttcaagacctgcctggccaacatggtgaaaccccatctccataaaaatacaaaaattagccgggtgtggtggtacaagcctgtaatcccagctacttgggagactgaggcaggagaatcgcttgaacccgggaggtggaggttgcgatgagccaagatcgtgccattgcactgcagcctaggcgacagacagagtgagactccatttcaaaaaaactgaccaaaagttggtctaatttttattttactttgcagtgacatttctaaacagtgtcaatgataaaatagtcctccccagggaagaaacagaaacaaaaaccttttggtggtctgctttctaaacaattgatgcaatataaaaaagggggaaaaaaacaattgatgcaattactgtcggttttttttttgttttgtttttgtttcattttttgagacggagtttcgctcttgttgcccaggctggagtacaatggcactatctcagctcactgcaacctccacctcccaggttcaagcgattctcctgcctcagcctcctgagtagcgcggattacaggcatccgccaccacgcccgactaattttgtatttttagcagacaggatttctccatgttggtcaggatggtcttgaactcccgacctcaggtgatccgctcgcctcggcctcccaaagtgctgagattacaggtgtgagccaaccacgcctggcctactgtcaaggttttttttttggtgtttttttttttttttttttttttttttttgagacagagtctcgctctgtcacccaggctggagggcagtggtgcagtctcagctcactgcaacctccgcctcccggattcaagctattctcctgcctcagcctcccgagtagctgggactacaggcgcccgccaccgcgcccggcctctttttttttttttttttttttttttttgagaacgagtctcgcgccgtcgctcaggctggagtgcagtggcgcaatgtcggctcactgcaaactccacctcccaggttcaagcgattctcctgcctcagcctcccaagtagctgggactacatgcgcccaccaccacgcccggctagtcttttgtactttttttcagtagagacggggtttcaccgtgttagcccagatggtctccatctgctgacctcgtgatccgcccacctcagccttctaaaatgctgagattacaggcataagccaccgcacccggcccttcttttttttttttttttttttgagacgaagtctcacactgtcgcccgggctggtgtgcagtggggcgatctcggctcgccgcagcctccacctcccgggttcaagcgattctcctgcctcagcctctccagtggctgggactacaggcgcgcgccaccacgcccggctaatttttgtatttctagtagagacagggtttcactatgttggccaggctggtctcaaattcctgacctcgtgatccgcccacctcggcctcccaaagtgctggggattacaggcgtgagccacctctttttaatgaactctgaaggatgataaaggccaagggacaaacattccaagcatcaggaatgttgatgcttggaatgtttctcaggacagatatggagatgcccaggcctcccaaagtgctggggattacaggcgtgtgagcccggcctcttttttttttttttttttttgagaacgactctcgcgctgttgctcaggctggagtacagtggcacaatattggctcactgcaaaccccgcctgccgggttcaagagattctcctgcctcagcctcccgagtagctgggactacatgctcccgccaccacgcccggctaatctttttgattttttcaccgtgttagccaagatggtcttgatctgctgacctcgtgatccacccgccttggcctcccaaagtgctgggattacaggcatgagccactgcgctcagccctccttttgagtttttgtgtttaaagttcaaaactggacagatgcagtggctcacgcctgtaatcccagcactttgggaggtcaaggtgggcggatcgtgaggtcagaagttcgagaccagcctggccaacatggtgaaactccatctctacaaaaaatacaaaaattagctgggcgtggtggcgggtggtgcctgtaatcccagctactcaggaggctgaggcaggagaattgcttgaatccaggaggtggaggttgcagtgagctgagatcacagcattgcactccagcctgggcaacaggtgaaactctgtctcaaaataaaataaaataaagaaagaagaggcctataccttcttccaagccttgacggctcagcacatacttctctgttttcatgctcaagcctaggtttagtaggcctgagtggcagtgggagattcaagtgctgggggagacctttggcctcacattcagattccaccttgagtcccatgatctcattgcaaggttagacttccattgtttaaggtaaataccattttgataactcagttacggcttttcatgtattattatgctaggagggaggctgaagagtgggagtggccctggctcctgaacacactattctctttcctgcctgaaggcctccgcatgtgccattcctgattcttggaatgtttgtcccttggcctttatcatccttcagagttcattatcaaagccacccctcacaaagcccttcctccgccaccccattcaaaagatctcttgttattttccatcccagcccctgattccttttctgtatagcactgtcaaagtgttttcaggccaggtgtggtggttcacgcctgtaatacaacacttttggaaggatgagacaggaggatcccttgaagccaggagtttgagaccagcctgggcaacatagcaagtcccctgtctccacaaaaaatttaaaaattagctggatgtggtggctcacatctgtagtcccagctacttgggaggctgaggtgggaggatcccttgagcccaggaggtcaaggctgcagtgagccaagatcactccattgcactccagcctgggcaacaagagcaaaacttccatctcaaaaaaaaaaaaaaaaagaaataatctaaaagtgttttcaataataatgcatttatgttgattaccttgttggctatcctctactcgtgtgcctgccccactccattcccctttctagagtctgttcacgtaactcctcttccaggaagccctctttgactcccaggcttggtcaggtgtcttctctgggtttccccaggggcttccttcctctcaattctgatgctgcctgtgctaagtatttgtctccatatctgtcctgagaaccttggagccagggctcggggctgtttttgcatgggcctatcacctcctccaggaagccctccttggccctctctcaggctggatgggaaagctgtctgggctcccatcatgccctggttttctagcgacccagcctctgatccctaagcttggccttccccatcacagctttcatcactttgtgctaagcttccgctatcactactctgggccgttcctgtttggtgactcagggaccagtctggcatggccaccgctgggtccccagcattaagccctggagcatgagcccagtgaactttgaaattcaggaaggaattcacaggaaagctgcggcgaggcgggcagaaaaccacaggcttccaagaaacgcgtgtctgccgccccctcctcccaccctgaggccagtcctagagcgaaggccctcctccgacgtcgtcaccaagcccaagggaagggtggcaggtgctcagcgggcagacgccccgccccgccccgccaggttctgttgggggcgaggcccgcgcaagccccgcctcttccccggcaccaggggcgggcccaggtgcgcccagggccggggagcggccgcgcaggtgcctgccctttgcgcctgcgcccagctcgccctgcctagccaggtgcgccccgccccctgcctgcccggccaccttcgggagccgcttccaataggcgttcgccattggctctggcgacctccgcgcgttgggaggtgtagcgcggctctgaacgcgctgagggccgttgagtgtcgcaggcggcgagggcgcgagtgaggagcagacccaggcatcgcgcgccgagaaggccgggcgtccccacactgaaggtccggaaaggcgacttccgggggctttggcacctggcggaccctcccggagcgtcggcacctgaacgcgaggcgctccattgcgcgtgcgcgttgaggggcttcccgcacctgatcgcgagaccccaacggctggtggcgtcgcctgcgcgtctcggctgagctggccatggcgcagctgtgcgggctgaggcggagccgggcgtttctcgccctgctgggatcgctgctcctctctggggtcctggcggccgaccgagaacgcagcatccacggtgagggccgggcgggtaggctggaggcggggcgcagggggcagaggctcgggggtcaacgggggtctgagcagggagaactggcgggggaggaaactgggggctacttgatggcgttcagcgggtgtggtggaaccagccctggaggattgagccttgaaatgaggtttgggagccttcgacagcgaagacgggcggaggagcgagggttaggagagtttccttcgggtggaggaagagtcaaggggtattgaccaagaaggcgtggcactgccccttcctgtggcaagaacggggtgaggagccgaattgaagaccagccttctcctggcggtggaaagttccatggccaaagctcagggagaggccaggcctgtgagatggtgggggttgggttgggtgacctggtggccgttttagactcggaagaagcccatctcacccctgcctctttggagattggacaagagcctcccctgaagtttttgtagttgagttgcagtaaagtaggtgcccgagaaggagggagcaagaaaggaaacaagctttggggaagaggaagctctgctaaggctcgagagagtattggcgttgagcagctggtgttggggtctttggattggcccttagaagtcggtggtgaataaggtgatttaaacttctacactcttaaggaagtgtggtctgaaaggtctctttgaacaagtgttgttataaccttaactgcttcagacaagcaccagcgtgttttgaaaagagctctcttgaaagcaagaattcattgattcagcaaaacttactgaggccctgctacgtgtcaggcactggcgctggttataacagttaactcagactagctgggttcctgcattcacagagctaatattccagtgggagaggcagagctagtgaaggtttaaaaagcacttgccatgagattaagttactgagaattaaatgaaccaggtgaagtacaccaacagggtgacgtaagatgttgggggcggctttagctcaggtggtcgggggacgtctccgtgaggagggtgacatctgagctctaacatgaagaatgaggcagtagccacacggagacctgggggaccagtgtccagttgcaggcaatagagtacaaaggccttgaagctggaacaagcttggttgggttcagggaaaagacagagccagcctggctggagcaggcgtgaaggaggggaggactggaggaggatgggaggtgggagaggttggctgcagccagatggcctagggctttatagacaggtgctggtgcttgaacccgggaggcggatgttgcagtgagccaagatcgcgccactgcattccagcttgggcaacaagagtgaaactcccatctcaaaaaaaaaaaaagaaggccgggtgatgtggctcatgcctgtaatcctagaactttgggaggccaaggcgggcagatcactggaggccaggagttcaacaccaccctaggcaacatgatgaaaccccgtctctaccaaaaatacaaaaattagctgggcatggtggtgcacacctgtagtcccggctactcgggaggctgaggcaggagaatcgcttgaagcccagaggcggaggctgtagtgagctgagatcaagccactgcacagcagcctgggcgacacagcaagactcagtctcaaaaaaaaaaaaaagagcaggctaggtgtgtaccaagtcatcacctgtggtaacttctggggactggttaatttctctgtgccctaggcaggagaaaaaagtgaattggtggggagaggctcagctgtaggtgactgggagtcaggaatgcagacgttgatcattcttgcaattcgaaccagaatttggcagctctgctggactttttcagtttaagtaattacgttaggatgtacctcccagttacctggcctcttgctacctctggtgcttactctgagctgggacatggcctcttgctacctctggtgcttactctgagctgggatgtgccatttaacctttgaaacagccgggtgcggtggtgaagttacttgccttgcccgaggtcactcggtagtagtaattgacaaagccaggtctcactgcagaggccttctctgttcagagtggcctacctgactgctgctgccgactggacctactgacctttcagaagtactagtgtctgactgggtgaactcatgccctcactcatcgtaagttctgtttgtttgaaagcttgaacagcttaatcggaggcagaaggcagttttgacttttttttcctcgctccttcctgattgcttctgttttctccggaagcgagtcatccactgggagtgtggtgttgctgaagctccatgcagtggctcaggtgctgctggatgagtgtggtggtgagggaggagtgaacagagaatgtgtgagggagggaggatgggggttggtcaaggaatttattctgtatgaaaacatgagggggcggagggccgaggtagatggtagggccagcagattgttggagttgaggttctgaagggaatgaaccagacagataggatgcagtgggtagtgagtgagatgcatgagagggaggttctgaagaggtggcagttactgagacaggtctaggtgtgaccctgagaggaagcgggggggcgagggtgggaggagatcaggtggaggtcttgggacctagaggtcagaggaccatctacctggatatagaaatctccaagaatgatcataagagcagcgggagaggtggcaggcccggagctaaagttgggaaggaagaagtagttgtctgggttggcagataacgtgccaggcggggtagtgaatgatttactctaataatggaagtctcccagctggggattttggggagggtggagggagaacagtccagaagcagctcccaggagcaaggagacctccccacttggaagggccccaggaggtgtgccctcaggggagattccaattaggtaagagggtggcaacaatgttcagaggagattgaggacatggaagatttgctcaagaccagtcctgagtaccagagggcccaggagttgggggaggggagatggggacaaagcaggccccaccgtgtgagagtgagggttaactcaggggtcggggcttcttgtgagaagcatcatgtggtctatgattgatgtgttggtgacgctctgagtagtgagggcaggtgggaagggacaggtggacgggccggacaaagagtgtcctgactccaacctctgcagacagaggtggggggaaagctgagcttatgccaggtgagaaagctcccctatctagcgttagggacagttaccgtctggagtggaaagcacgcagagattataaactgtccactcccaggaagcttcacacagcctttatgtgacttgtactttttccagaattgggattttttaaacgtaaaaatgtagtttttggctttgcctgaaagacatgaagatgtaatggaaccaaaccagaacacaggcctgttttcctgcccagcagtccctggcaggagccgagtacctctttcaggcaggagatatgccattccctagcctgtagatcttactcagcttgcctcatctcagctactgcttgccctctgtctctgtaggcctttggcttgtgacccctaccttaaacatatgctccatttagtaaatggtaacacgtaacagttctttataaattgcacattacagtgtgagacagagagagagcatgcgcgcgcgcgtgtgtgtgtgtgtgtgtgtgtgttacggctggctgttggggaaatccttatatcaggtagctgcagatatgcaggatttttttcttttccttttccccacccaggtggtaaatcctggtatttggagggtcctgaaatgtgtaatgttgctcaacaccaggccagatcatatatttcctcagcagaatagaaacttgaaaggtcctttaggagtggccagttaggtgtagttcttgctgccaataactttgtgcctggccctgggcatcagaacttgtgttaatggttacttggcttaaggtcttttgtttttgtttttgtttgtttttgtttttttgggtttttttttgagacggagtctctctcatcgcccagtctggagtgcagtagcgcgatctcagctcactgcaatctccacctcccgggttcacatcattctcctgcttcagcctcctgagtagctgggactacaggcgcccgccaccacgcccggctaattttttgtatttttagtagagacagggtctcaccaccgtgttagccaggatggttcaaggtcctttgttgattcttcttgggaatttccactggaggcaagcagggcaacacttatttgagaacctctcctgcacctttttttttttttttttttttttgagacagagtcttgctgtgtcactcagactggagtgcagtggcgccatcttggctcattgcagcctctgcctcctgggttcaagtgattctcctgcctcatccgcctgagtagctggggttacaggtgtgcaccaccacacccagctaatttttgtatttttagttgagatgggatttcttttctttttttttttttttttttgagacggagtgtctcgctctgtcgcccaggccggagtgcagtggcgcgttctcggctcactgcaagctccgcctcctgggttcacaccattctcctgcctcagcctcccgagtactgggactacaggcacctgccgccacgcccggctaattttttgtatttttagtagagacggggtttcaccgtgttagccaggatggtcttgatctcctgaccttgtgatctgcccgcctcggcctcccaaagtgctgggattacaggcgtgagccaccgcgcccggcctgagatgggatttcaacatgtgggccaggctggtctcgaactcccgacctcaggtgatctgcccacctcagcctctcaaagtgctgggattacaggctcgagccacgtggcccagccctctcctgcacttccaagggattttcgaaatgcatggacctctcaggttaattatagtgtctgtagaaccttaactgctgtaagctttccagcagactccacagacgtgttattagttgccaccctttctttactttcctcctcacccccatggatagtcgtgaccctggtggtcagagataagatgacagaagagctaaagtaaagctggtgttggcgatcagctgggaattctctaaaacagcttctcacattattcttatcctccatagaaggagtgcttgtcctacttgcaggcaaggcagtttggttccagggtagttcgaaatcttattcactgatatagtcagcaaatgtttattgagcacccaccaattgccaggcactgactcactcaaattagagcactgaacaaaatagaccccctcccccatccgtggcagacgtgtcataatgagaggaagacagtacaataaatgaacagatgaatgtatgtctggtgatgagtgtcagggttggtgtgcttagcactgaaaatgggggcttctgaggttcaaatggttgcagttcctaaagaaggttgagggccttgccttcaggtcaccgcgggagactggcccctttccactggaaacattgctttgcccagtcagtatttgagagctcagcctgcaatggagaaatcacacttctcctctttcaccctgctccccaccctgtttctcattttacccatccccagccatttgcagaatgcatgcagagcttctgtttgccatgtctggaggctacaggggaggctgaataaggggtgataagcctgtggctcatgtgaggcgggagagagcccagcaggagtcacactgaaatgactccattagccccaggaggccttggcccaccggccatgactaatgtggacattagagtgtggattccgatgtcctgcaagatcctcctcacaagtgtcatttcatggtttttttctggcaacatctttttgaaaactccctgtaaagaagtgctgatgttgatgctgaggcccaggaactttggagtttatttacctttttttgttgttttattttccttggcaggtgaagtaggagctagagtttacttattttgaagtttatttgaaatatgctttttatgattagaagccattttagaaatgagggcgaggccgggcgcggtggctcatgcctgtaaccccagcactttgggaggccgaggcaggcgggtcacgagatcaggagatcgagaccatcctggctaacacggtgaaaacccgtttctactaaaaatacaaaaaaattagcctcgcgtggtggcgggcgcctatagtcccagctatctgggaggctaaggcaggagaatggcgtgaacccaggaagtggagcttgcagtgagctgagatcatgccactgcactccagcctgggcaacagagcaagactctctcaaaaaaaaaaaaaatgttatgctaagtgagaggagccacttacaagagaccaccacatgtttggccgggtacagtggctcatgcctgtaatcccagcactttgggaggccgaggtgggtggatcacgagatcaggagttcaagaccagcctggccaagatgttgaaaccccatctctactaaaaatacaaaaaaaaattagccgggtgcagtggcaggcgcctggaggctgaggcaggagaatcgcttgaactcggagggtggaggttgcagtgagccgagatcacgccactgcagtccagcctgggagacagagtgagactccatctcagaaaaaaaagagggcaagaattcacatgttgttttactcacacgtgttggagatggagctcagggtgattcctgactgggcccagggtccatggcctcagaagtcccttaatctgaagtccttcacttttatgtgatactgctgggcacaatggctcacgcttgtaatcccagcactttggggggctgaggcaggtggattgcttgactgaggagtttcaacatggtgaaacaaaaaatacaaaaaactagtcagcctgtagtcccagctatgtgggaggctgaggtgggagaattgcttgagcccaggaagtggaggttgcagtgagccgagatcgcaccattgcactccagcctgggcgacagagcgagaccccatctcaaaacaattttatatgtgatagtttgtccatgtgtatgccagggtctgtcatttagagtgtatggcatgttcttaaaggggtgggggaacaaaaagatactataatagtttgtgaccttttgaagggccgctctacatgaatagatatatagtatgtctgtggtgttaaaattttgtggggcgattaggaaaaacatttccaaaaagtcttagggggaaggtagtaatgaaaaaaggttgagaaacaccattccagagagagggtccaagagctttcctcagttctgaaaatggtccatgatttgcacaaggtaaagaatggctgaatgcgaattaacagcagacagtttcttagaagatttgaaactattgtttccttcccagctattcagatggactgctcgggttcttgttatggattgaggcgagggtagacttaatagtcttgtttcagagtggaatatggagtgatggtaggcatgagtagtgatgagttgcattgtgctgataggttatgaaatgtaaattttttattttttgatatggagtctctgtcgcccagactctggagtgcagtggtgcgatctcggctcactgcaacctccaccttctgggttcaagcgattctcctgcctcagcctcctgagtaactgggattacaagcatgcaccaccacgcccggctcatttttttgtatttttagtagagacggggtttcaccatgttggccaggctggtgttgaactcctgacctcaggtgatccacctgcctcagcctcccagagtgctggggttacaggcgtgagccaccgtgcccggcctgaaatgtaaacttttatatctaaatattttatatagaaaataccaagattttatatctgaaacaccaagattttatgagcctcataacttaagtaggatttgtaattgtaaatgttctttcctcataaatacctgaggtttttttttgaaaggttctgaattgtctcaataatgaaaacttccagacacccaagcctagaggagatgggtagttggtagctttctgtactggaaacagaaacactcaaatatatagaacctagccagctaaccaaagtaggtagatttatagatcatcttaaaataaggctgattacacagtaaatgtcacctttggaatctggcttggtagaattgaaataggcttcagtacctcctgtcattcagtacctgttttcttgaactcctgacttcaggtgatctgcctcggcctcccagagtgctgggcttacaggcatgagccactgtgcccggcctcagtacctctttttaagatgctctcattcattccctggtgaaaagatgcttgaagtgcaagtgcaagtaggtgtggaaagcatggagggtttgtgttgcttcatttgttttggtatttgttttttccaccagtccctccctctggctttctgcctcccagcccagcatatcctgatcttgtagccatgcaggactttgacccgtgtggtggtttgccattgtcttcctccaggtgaagataagacatcattggtttggcttgaggttgtacttttggccttccctgtatatcctcttcctccttatcctctccgtcagcatgcttggttggactctgtagtgaaatgtgtcattctctttattctgactgtccctatattagtcctgtcttcataaaaaatacaatcgtaaagatacaatatctactatttgttaaaagttttgtgctaggccaggtgcggtggctcacgcctgtaatcccagcacttcaggaggccgaggcgggtggatcatttgagcccaggacttcaatactagtctgggcaacatggtgaaacctcgtttctacaaaaaatgcaaaaattaaccgggtatggtggcacacgcctatagtcccagctacttggaggctgaggtgggtgggtcactgagcacaggtcaaggctactgtgagccaagattgtaccactgtactccagcctgggtgacagggcaagtccctgtctcaaaaaaaaaaagaaagctgtgtgctaaatactattttaagcaattataatggattaaaaactcctttaatcttcacaacaatgttttttctttctttttttttgagatggagttctttgaaactcttggattaaatgactcttcagagctttctttgctttttgatactaaggagtggcatgtctggggatttttatagcaaataacttctccttggctactatccttagaattccaagtgtttttaatgaaaagaggagacttgtttttagtgatgttagttgtttttaggaaaggtgttctgcagtgtttttcgctaaggtggctcacgcctgtaatcccagcactttgggaggccgaggtaggcagatcacttgaggttaggagtttgaggccagcctggccagcacagcaaaaccctatctactgaaaatacacaaagtagccaggtgtggtagtacactcctggagtcctagctactcaggaggctgaggcaggagatgacttgaacccgggaggcagaggttgcagtgagcctagatcgcactattgcattccagcctggacgacagagtgagactgtcttaaaaaaaaaaaaaaacataaaatggagaggtagaccagcttacgggaggtgttgcacttccctctgccactggagagactctggatctgcagccagggagcttgtgaaggcttcttgtccacggaaatgagggcggcagttgtgactttctggatggtggcccagaggaagcaacactggcagagcctcttctgtgaagcagctctgcgagcaattttgtgacattgaaagagcaaaggataaaacgttgaaagctgatccagatctagaaaagtgtttggcaattgctggaaaaggtgtagaaatgatgcttgctctgtatcgtaagttatatggtgagaagaccacaagcacggttcaaactccccttagaaattcttttgcacagaaattaacactttaatcctaaatgtttccaatgttttaacttacagtatgctaaataaacattctttctgtttgtttgttttgttttgttttgttactctgtgcatttatagccaatagagtttttctttccttatttttttgacacagggtcttgctctgtcgcccaggctagagtgcagtggtgcgatctcagctcactgcaacctccgcctcctgagttcaagtgattgtcccgcctcagcctcccgagtagctgggactacaggcgcgcgccactgtgccgggctaagttttatatttttagtagagatggggtttcgccatgatagccagggtggtcttgaaatcctgaccacaggtgtgagccactgtatctggccaaaaaaatttttttattttttgtagagacagggtctcactatgttgcccaggctggtcttgaactcgtgacctcaaatgatcctcctgcctcggcctcccaaagtgctgggattataggtatgagccaccatgcccagcttgacaaaaaaatttttttttttttttgagagatgaagtttcactcttgttgcccaggctggagtgcaatggatcagctcactgcaacctgtgcctcctgggttcaaacgattctcctgcctcagcctccagaatagctgggattacaggcatgcaccaccacgcccggctaattttgtatttttagtacagacggggtttctccatattggtcaggctggtctcgaactcctgacctcaagtgatccacctgcctcggcctcccaaagtgctgggattacaggtgtgagccaccacgcccagctgacaaaaatttttaaatgtcattgagcagtatcatttttcccactgattatgagattgctttgtgtgatcacacactgacgggcaggccaattgctgcttgtattcagtatttggccccttatagaaaacatttgcagacccttgttctagaaaaaacagatgggtgggaggaggaggaggagaagcatttcaggagtggctttgggctttcctgtcctgcacgtggtgaggcaagaagctcttgtgcctcagctcatagcactcatgggagtctgtcaataactagaaccctaggagttatttttgcttgttttaaaaataagcttgttttggggccaggcgtggtggctcacgcctgtaatcccagcacttcgggaggccgaggcgggtggacttacaaggtcaggagatcgaaaccactgtggctaacatggtgaaaccctgtctctactaaaaatacaaaaatcagccgcgtgtggtggcgggcgcctgtagtcccagctactcgggaggctgaggcaggggaatggcgtgaacccaggaggcggagctttcagtgagccaagatcgcaccactgcactccagcctgggcgacagagcgagactccatctcaaaaaaacaaacaaacaaagcttattttaatggatataaaaacatgaatgaaataagacaccaagttcaaggtggtagggggttaatttggaagaggcagagcaaatgtgattgaatgaggggtatgcaaagggtttctgctctatccatatgttttatttattaatttatttttggagaacaaagtctcgctttgttgcccaggctggagtgcagtggcgtgatctcggctcactgcaacctccacctcttgggttcaagcgattctcctgcctcagcctcccgaggagctgagactacaggcacgtgctaccacacccggctaatttttgtatttttcagtagagatggggtttcaccatattggccaggctggtctcgaactcctaaccccaggtgatctgcccagcaggcctactctatgttttagtccttgagaatgttagaatttgatgacactgagatgtggatataccagacatggggtattttctgtactcatcagcatatttgaaatatttcattaaagttcttactttgcaaagtagacacagctgcaattatgcatttttggaaaatgattaggtactatctcatctgttttgtttttttgtttttttgtttttgagatgaggtctctgtcacccaggcctgagtgcagtggcgcaatctcagctcactgcatcctctgcctcccggtacaggtgatcctcctaccttagcctctcaagtagctgggactgcaggtgcacaccaccacacccggctcattttttttgtatttttgagctcaagcaatttgctcgtctcagcctcccaaagtgctgggattacagatgtgagccactggcccagtactatcttgctaagcctataaaattagattagattggtagtacttgggacccctcagaattctataatgtccttcttagaaggtgacagcagatctatccagcagactgtagattgttgtcttagtcaccggctgattgtcttggttaaagctctagtgacttcagaaccagagaaacttgttttccaacacattcaaagaccagtttgctttgcaattttgcaatagctgacattcagaatgcctgcgaggattttgtaagtgaggttcatatttcggataatgtgtgacttttgccatttctgatgcttttccaaaagaaagttactcttccctaaaggcaggaattctacttttgcttagatattctgaagcttatgagttcatccaaatttggttcctttcagcattttcctgttggtccgtctccgttttgaaaacatacagaatgtacttaattttgccctaccatttgtgagcatacaaaatagcacttgagtcatatttttcatgattgcttcccaatactattctaagaccaacatagcattttgtcatttcataataatagaattcctcattaaggaataactttctaaaaatgtgtccagcccatttcccccccagccctggccgtttcctttggtatgttggtgtccgtgaccctgtcattgagtgtgactgaaaacagaggcctggcagagggcctggcctttgtgagccctcagattgtgataaagaccctgaggaatgttttggcttttaggcaacctcagttctgttttcctgctgcctgttgatgcagtggctttttcttcccatcagtctgaagggtcgtgttagtgcctgggctctcatcagaccacagggaactcatcctggcactgctggctgcctcactttaaccacctcaagtctcagcattctcgtttgtaaagcggagatattattacgtgattcacagttttattgtgaccattagaggtagggcacatgatatgccaggcatcatgcttggcgaaggcaataagtaatgcagccaggtgctgtggctcatgcctatgatcccagcactttcagaggcggaggcagcaggatcacttgagaccagcctgggcaacatggtgagaaccccatctttacaaaaaattaaagttagccaggcgtggtggtgggtgcctgtagttccagctactcaggaggctgagatggaaggattgcttgagctcaggaggtcgaggctgcagtgagctgtgatcatgccactgtactccagcctgggtgacagagtaagactgagtctcaaaataaataaatacaaggtttttgcagaacagtgaatgagaaaatgcactgttgttatttgtggtggaagtgaatactatatggcctgtgtttcctgaaggaacactgcctccattaaaacaaatgagcaaacaaaatcccttttcatgacttcagttctctcaggcctgagagtaaagtttacatcatagatgcttaaaaacaattcagttagtgaaagcatgtgacaagatgagacgatttgtcttcaacgaggagcttccttccatactcacaaaaagatgtgtgtcttaacatagtaaggacatggttaaatttagtcttatttggacctaacttcagccaattaatctgctacttagaactcttttactcaaatgaaatttgagtaaaaaaaaaaaaaattttttttttggccaggtgcggtggctcgtgcctgtaaacccagcactttgggaacccgaggcaggtggatcacctgaggtcaggagttcgagaccagcctcaccaacattgagaaaccgcgtctctcctaaaaatacgaaattagctggtgtgatggcgcagtcctataatcccagctactcaggaggctgaggcaggagaatcacttgaacctgggaggtggaggttgcagtgagccgagatcgcaccattgcattccagcctgggcaacaagagcaaaactccatcttaaaaaaaaattattataataattttcaagtatatacaaagcagtgacacattttgtaaacccccatgcaccatcacacagcttcaacaactaccaacatctgtctttcagacatgtttttagtccaagttttctcttaataaagagactttttctttttcttttttgtttgtttgagactgagcgttgctctgtcgcccaggctggagtgcgatggcaagatcttggctcactgcaacctccgccttgcgggctcaagtgattctcctgcctcagcttcctgagtagctgggactacaggtgcccaccaccatgcccagctaatttttgtatttttagtagagatggggtttcgccatgttggccaggctggtctcgaactcctgacctcaggtgatccgcccacctcaccctcccaaagtgctgggattacaggcgtgagccaccatgcctgaccataaagacatgtttctaaattctcctgggacaacagtgaagttctacctttccttcctactttaccgaaggaacctgaaaataaggctgctttctgaaacttaaactactaagtcagtgatatttagagcagatgtaagcagctgtctagacacagaatggcttcccaggctcgcaagacttgtcatgaagcccccagcacgtcaacagaaagcatccaagctagaagaggcactggctcacagcagcaccccagaaaggaagcgtctcagggacagatcgtgaccgtgctccggaagagctgtcctcagccgctactgtgagcatttggcctgcctgacagattctgttggtgagaatgttcttaggaatcatacagtaaactaactttattctgacttcaagcatcgtgttccattgatgcttgctttccaaggtgttttgctgattcacatcagcatgcaacctgcttgacagaatacagtgatgttctcactgtaaattcatcacctgctgctgtggtctcatgtatcatcccgtgcgctgttagctgaggccagtgctcctgtgtctcctcagcacgagggcactggcaagagtgcatgtctgggcctataaagatgttggccaggttctaggcagggttgaattcaccaaggtaactgccatccatccctcaataggcattttttctcctacacaccctcaggcacatgccacgtgtacctggcacccttacttacgaagttaccgaattcctgccatgatactgtgggtcaccctgcttcattctcaggtgtggtgtcgggtggttcctgcctgggcgccgggtgttgttgggccctccctcaggttattggtttttgttttgagatgtaattcacatgccatatgattcacccatttaaggtgtacaatattcccctgaagtttattgtggaaaaaggctgtgtctgacactgcttaggaagctaagacacaaagcagccagaggggctgccagggctcactgtggcagggcggcggagaggctgctggcgcctctgtagctgttgggtgctcttgccttgatgctgttttcagctttggattgtaattgggtcccacgtgggtcctcttcatctcgtcttgttggtggcagtgttgctcccagcgttggggtgggcagagtcacacaccagaggacctcctcctgctgttttctctggaccttgttgattatgtgttttgtgacctttggcatattgtacctgttccaggtgtacagccagctggttttggttgatgtgtaatggacaaaaggtgcccctatttaaaaaaaaaattttttttctgcttgtagtcccagctactcaggaggctgaggtgggaggatcacttgagcctaggaggcaaggcttcagtgagccatggtcctgccactgcactccagcttaggtgacagaggaagaccctatctcaaaaacaattatataggccgggcgcggtggctcatacctgtaatcccaacactttgggaggctgagatgggcggatcacctgaggtcagaagttcgagaccagcctggccaacatggtgacaccccatctctactaaaaatacaaaattagccaggtgtggtggtgcatgcctgtaatcccagctacttgggaggctgaggcaggagaacagcttgaacctgggaggtggaggttgcagttagcggagatcacgcctctgcactccagcctgggcaacaagagtgaaactctgtctcaaaaaaaaaaaaattatcataaaatcactcgttttaagtatatcatccaaggattttagcaccttctacagagctgtgcagctattgccacaatccaattttagaacattttcatcatcccctaaagatccttttacccatcactccccattcccacccccagtaccaagcagccactcatctacttcctgtgtctattgatttgccttttatggacatactgtacactttcattcatatgaagtgtctagataaggtaccctctaacgggtgacttttcatggttagcttttttcaaatgatagggaatttcctgcttcagaagatgctttttctgctgtgctacttacctgtgatctattgtgtgggtgggatttccttggaggcatgtatgtgtttgtttgttttgcagagtagcaaccttttttgtccgttgattagtgttctgtggaacatctggtttcatgcccatcactgtgacatatttggggagacacaacagaagatatatccctagtgggtgaaacaaacctaacaaacatgaaaacaactagcgaggagtcaatgacaacatctaagcaagcgtttggctgtgggatgcttttattggagacatgtttatcaagcatcctgtgccaggccctgtgcaggttggaatgcccttgtgctgagcaggcagaggtgggtgaaggccagggttagggaggggtgataaccgtgatacaggagcagacatggagccacacagccaggctgttttcttttcaggtcgccttcaatccttccagtggaaaggcttattttggtgcaggtgttgcttctagcaattgtttctctctccctttcaagagagcgtaccgaccttttgcaagaagtgtttctggctggaattttataacattggcttttgtttcccttttactaaagtagggccagatttgagggtgccttgaaacccaggcccatcttggtgtgcccaaataggagctgtaacaagccgtggtgcaggggtaggacctgtgttgtctttggagccatgggctgggctgcaggcactcgagttaagaagcttccttctgaggctcttccagtaatttgagtgtcctgtggcctgcctgggcagagagtggacaggaaagatcaggaaaagcacgtgtgaggactaccgagggtgctgatagcgcctctccttcccaacttcacttctctggctctgacctttcagccctaagctccccttggccctgtgggatggggcagcatccagaagggtcttggagtcaggttttgttttgtttttttttttttaagtcatgtttccattgggcgtagtggctcgtgcctgtgatcccagcactttgggaggccgaggcaggcggattgcttgatctcaggagttgaagaccctcctgggcaacatggtgaaactccatctgtactaaaagttcagaaaaaaaaagcccagcatggtggcgcacgcctgtagttccagttgcttaggagggtgaggcaaaagaatcgtttgaacctgggaggcagaggttgcagtgagctgagatcgagtcaccacactccagcctggcgatggagtgagactctctctccaaaataaataaataaagttatgtttctacactggatgtgcatgtcttcaataatggggacaggggacaaaacacacaactgaaatacagttcagtgggtgggttgctgtctttattgttgggtgatgtgtttatacaaggaaggaagcactgagtgggcctgttgacgatctgggcttgggaaacagctcacaggggaactgctggaactcaaggctctggttctcctgggggatccatgtacaggtctgtgcgtgtcctttgttgccaggattgccctgccaagctaaccgggttgtgcttcgcgtttcagacttctgcctggtgtcgaaggtggtgggcagatgccgggcctccatgcctaggtggtggtacaatgtcactgacggatcctgccagctgtttgtgtatgggggctgtgacggaaacagcaataattacctgaccaaggaggagtgcctcaagaaatgtgccactgtcacaggtgagatggcagtagttggagcttttgtttttttccttttttttttttttttttttttttttgagacggagtcttgctctgtcgcccaggctggagtgcagtggcgcgatcttggctcactgcaagctccgcctcccgggttcacgccattctcctgcttcagcctcctgagtagctgggactacgggcacccaccatcacgcccaactaattttttgtgtttttagtagagacatggtttcaccttgttagccaggatggtctcgatctcctgatcttgtgatctgcctgcctcagcctcccaaagtgctgggattacaggcatgagccactgcgcccagcccctgctttttttttagacagggtctcactgcagcctccacctcctgggctcaagcagaacctcccacctcagcctcctgagtagttgggactacaggcacatgccaccacaccttgctcattttgaaattttttatagaggcgggggtctccctatgttacccaggctggtcttggactcttggcctcaagtgatcctcccacctgggccttccaaagggctgagattacaggcgtgagccactgtgcccagccagattttgctctttagagacaatttattaactggaatgtggatactttcctctctttattagttcttgacagtggaatctgggtgacgttttaaaaagcagaagaaacaggcaccgtgtgaatgtcctggtggccgtacagtggtttcacagcagaccctcactcctcctcttcccagaaagggagcaaaacaacagggcagagctggggccagcgtgacccagcttcctttctcccactttactaagtgcaagtttcagagcagaccaaagaggaagtagccttgccttcttgagcagaggctttttgatccactccgacagggctgcccctcttgttccctgggtatttgggttattttattttattttgagacagagtcttgctctgtcgcccaagttggagtgcagtagagcaatctcggttcactgcaacctcagcctcctgagtagctgggattccaggtgtccaccactacgcctggctaatttttgtatttttagtagagatggggtttcgctatgttggccaagctggtcttgaacttctggcctcaggtgatctgcctgccttaacctcgcaaagtgctgggattacaggtgtaagccaccgcacctggccgctatttgggttatttttaattgtgggacaagtgacttgaatagctcacccagccaagttaccgatcaagttaaaacaaacatacgtcctggaatccatcctctttgcggccctcacctgcgaggagttctgtggaatcaaggtaattttgaccctgataacctcacagtttaaattaaaacctaaacctcccagcagcgtgccctggctcttagctgagtgagaaggacttcctgagagctggtggtgatgagacattggccctttggggctgctccatcccgagtgttccagagacccgagggtttggccatccaaatcctatgttaaagattttcacttttttctttttttctcgcttagtcgcctaccaggctggagtgcagtgatgtgatcttggctcactgcaacctccacctcctgggttcaagtgattctcgtgcctcagcctctcaagtagctgggactacaggcgtgcacctccacacctggctaatttttgtgtatttggtgaagatggagtttcaccatgttacccaggctggtctcaaacgcttgagctcaagcaatctgcctgcctcccaaagtgctaggattacaggcgtgagccactgtgcccagctaaacatttcactttaactgaaaaaacaaacaattacactggcctttaagtaaaaaataaataaaaatattttcagcggcactccccctaacatgtttttttgatgacttggtgttgtctctgtgagccaccgttgacccagttactgtatttctatcgtcagctgtgattcattatgaaggaggacttgggagaactatcttttgctaccttttctgagctatcccagtcaagagttgcctttagcaaatgtatctgtccatcctggctgtttgttacctcctcaggaagggagctgaagtgttgagaactcaggcagtagacagtgaacatagccaggggacatgagtggctgtgtgttcctgggagcaggcaggttagctgtctccctagagtccggccccgccttgcaggtccagaaagcacatattggcatctgactggctgcaatgtgtgtctctcgaggcgctcccatgtgagtctgtaaagagctaaacactgccagggctgctagtgcctggggtcctttgccggcatattctctcccaggcaggcaggctctgtgggaaggcaagtgagaatgagactgccagtgtattaattcatcatgagaaccaggaccgccccggggagcaggcactcgtgtccccgggcccacgcctttagtccgcataggcaagtctctagtccagttgccagaagactgcttgatgaagagagaggcagaacgcggggagctggtttgcaaggtgaccgtttaatagcatcaggctaggccaggcccgaggatgcggaggagccagggttccctccatcttggacgaggtgtgggagataagcgctgtgtaaaatgtatcatgtgggccgggtgcggcggctcacgcctgtaatccagcactttgggaggccgaggtgggcagaccaagaggtcaggagatcgagaccatcctggctaacacggtgaaactccgtctctactcaaaatacaaaaaaaaattagccgggcctggtggcgggcgcctgtggtcccagctactccagaggctgaggcaggagaatggtgtgaacccgggaggtggagcttgcagtgagctgagatcgcgccagagcactccagcctgggcgacagagcgagactccgtttcaaaacgaaaaatttgtcatgttaacctttaaaaaaagtgtcgtgttttgttttgtttttctccccccaaagagattaggtctttttatgttgcccaagctggtctcaaactcctggcctcaagtgatgccccccacccttcacccagtgtaagcactggtattacagttgaattagttagatgagttgatacagttaagcaattatttggccctggaagtcactgtgttttgattgtttgtttctttctttgagacggagtttcactcttgttgcccaggttggagtgcaatggtcaatggtgtgatctcggctcactacaacctctgcctcccaggttcaggcgattctcctgcctcagccacccgagtagctgggattacaggcatctgccatcacgcctggctaactttttgggtttttttgtttgttttttgagacggagtctcactctgttgcccaggctgagtgcagtggtgcgatttcggctcactgcaacctccgcctcccgagttcaagcaattctcctgcctcagcctccggagtagctgggactacaggcgcgtgccaccacacccggctaattttttgtatttttagtagagatgggttttcgcagtgtcggccaggatggtctcgatccctgacctcgcgatctgcccaccctggcctcccaaagtgctgggattacaggcgtaagccaccgcacccggccctaacttttgtatttttaataggttttgccatgttggccaggctggtctcaaactcctgacctcaggtgatccacctgccttggcctcccaaagtactggaattacagccatgagccaccacacccggccaagtcactgtctttttaaggtcactttgcacatctctgctctgattccctgcaagttaatcttaagtttcctcttcgggaggcaatcttggttccttatttccaagttgtggtctggcatgcacattgaaggtcccatgtaaaggagaagtggatgctgtggtgagaggcgcacagggccagctcattctttgtccctggcagtctctcgaaagctctttcactgtgctgtttctttgtccccttgcagagaatgccacgggtgacctggccaccagcaggaatgcagcggattcctctgtcccaagtggtaggttcttaaagagacccgcgatggagtgaggccaccggatgggtcattgtgaaaggacacttgtcatttgggaactgtcacaggcttccctctcatggttctgtttactcaaaattggcaaaccgggggctctgcctgggctgccggcttctggctccagcatccttatgggggagtttatactgtccagctgacacaggggccggggatcctgcagcacttcctggctggcccccatctcctcctggaggatgggatggaggtggctgctgcccatgaggctcaggcccctccttgctgtgcgggcctccagctgctctgctgaccccactccccacccaccctcctgtctgcctgttctgtctcctctgcttcctttgctccctgttgccatcgctgtcccctgccccgtgggcatcctctgtcctctgccacccccgcctccccgccactgcagcttgtgatctcaagatgtgtgttagcttgctttgtagtgctggcggctgctgccccattcctcctttatggtttaaggactctgcatcgggcgcctggggtgagtggtcccgatgcactaccaggtagcaaatgcaccctcggggcagacctcaggccatggactctgggaggctgctgtggagggggtactgcaccgcacccctgctggaggatgggactcccccggcagctgctacccaccgagtgcactgtagctcagcagctgttgggccggctggcttgcagagtgctggggcgttagggtggtcactttccagctttgctaggcctggagtcctgtgcctgtcctggctttgctctgcctggctccctgtttatcctctgctagcccccccacacaccagctctggtttccatcttgttggagaggaacatgtccccctcactgtattagaaagtgtgaacaagaccgtgttccctataatattaggagctgtggcaggcttggtttctataggaaccctgaggtggcggcagggccaccacatccagcactctcagtgtgtgcgtagagcccattagggctggggtgacgtggcagagccggccatggaaggggctacacaccccttcttaaaggcgtgtccacactcctcagtgggcccttccagacccagacccagctaggcctgtgtcctgtgtccggcccagcctccctaacacagatgtttgtgtttcagctcccagaaggcaggattctgaagaccactccagcgatatgttcaactatgaaggtaaaactccaaagaggccaggtgcggtggctcacacctgtaatcccagcgctttgggaggctgaggtgggcggatcacgaggtcaggatatcaagaccatcctaacatggtgaaaccctgtctctactaaaaatacgaaaaattagctggacgtagtggcatgcacctgtagtcccagctactcaggagactgaggcaggagaattgctcaaagcctgggaggcggagggtgcaatgagccaagattgcgccactgcactccagcctgggcaacagagtgagactctgtctcaaaaaaaaaaaaaaaaaaaaaaaaaaaaactccgaagaaacttatatatggggcaaaacatgtattcttagttgggtattgagagacacttgcggattttcactgaggaagttgtagagcagggctctcccctccccaggtggtggcagccccctgaggttggggtcaaggtgacaggccccacgtggatgccgccagcagtgggaaggaggctgcgcctgtggagatgtgcgttagaggcgtagcctggcacgtggctctgcaatttacattgtccctgaacctctcgccagcggcttggctgtgggcaagtgactgttgccccgcctcagagttcccatgtataaaatgaagggtcccagataggtctcatagagactcagccactgcatgtaaaaggcctagaacagggcttggcagagagcagccttcaaagctccgaagccgtcacctggacccaaggagcagcgcgtcagagccgctgcactggtcttgggtgtaatttacaggcttctttaccagagagatgtttctccgtctgctggagccgcaagcctcctcaggcactttctggcttgcttcccctccttgcgggccctactaatttgtattccctgggctgtcttactcctagaatactgcaccgccaacgcagtcactgggccttgccgtgcatccttcccacgctggtactttgacgtggagaggaactcctgcaataacttcatctatggaggctgccggggcaataagaacagctaccgctctgaggaggcctgcatgctccgctgcttccgtaagtctgcagcccctcagcccaggaagccctgcccttgaggaccccggtccatctccccatccctaaaatatgaaggccttggaaatgctgttcttgggcccaccagggcagcaaggcctctaagccccagaaaagctggaagaaagcccctcagaaagagctccccatggaggccctggctgaggggatcccctgcggcagctctgtggaatgggggctgtgagctgacctcaggctgtgtgttctcttccaggccagcaggagaatcctcccctgccccttggctcaaagggtaagtggccccttaccctcctcctgccatcagcctgcctcctcccttccttgactgagctcagccctgcccagctgtggtttacattatccttcactgtgaacatcatcttggcagaaagtcatgtttctgcgtgagaatggcgaggtggtggtttgtcccaccgttcagtgtacacagttggggctggagtgagtcagtcacaaggcaggccctgcccaggcggcgtgggtgactggggatgaggtcttcctgttgagcatttgaggactgctgcacacgggcctgaggctggcctgaggtgtggagggagcgctgctatgtggggcataagagttggtcacgggtgacaggacggaggaccacgggccagggtgtttcccaacacagtctggtctgagcgggaggccaggcctctggcctgtgtttctgagcttgagttgcaggtgataatgttggcacaaaagacctgccatgccagtctggcctctttctccacctgtttcccggtgaaggagccaggacctggcctgcgagtctgtcctgttctagcagtgaagcctggtttgccaggcacggggctgggaagcaagcagtctgggtctggagggtggccccaaaaaggccaactctgcagctccacagccacatgggggaggctgccacaggtcacactccttagccggatcccctcctgaagaaaagcatctgagctgaccagcgagactgcagtggggcagacactattaaatttgctggcacagctctgagtaccccctcgcttccaccctgacttcatcccgcagtagctctcagccctcccagcccctgcagggccacgtctttctctattgccggtcagcgtgtgtgtgcacaaagcccctaaggtttcatgtgtacacaccggtgctaagtgttttttacacccttgtgcatctctcggcctggggctcctgtgcaggttgccctgagagttgggtttttagttcaaaaagaaggaacacagatgactactctgctggcgacacggccactctgctggcacgcacatagcatggcgcctccttttttgggggactctccttggtggcatctctggcaggctgtgtcctctccagctgcagttctggaccctgtctgggttggggaggggcatttggtcctcaggctgagcccacctggattccccaggcccttggtgagcgccactctggctgcaactccccttgcctggcccgtcctgaggcccctctctcgtcctcagtggtggttctggcggggctgttcgtgatggtgttgatcctcttcctgggagcctccatggtctacctgatccgggtggcacggaggaaccaggagcgtgccctgcgcaccgtctggagctccggagatgacaaggagcagctggtgaagaacacatatgtcctgtgaccgccctgtcgccaagaggactggggaagggaggggagactatgtgtgagctttttttaaatagagggattgactcggatttgagtgatcattagggctgaggtctgtttctctgggaggtaggacggctgcttcctggtctggcagggatgggtttgctttggaaatcctctaggaggctcctcctcgcatggcctgcagtctggcagcagccccgagttgtttcctcgctgatcgatttctttcctccaggtagagttttctttgcttatgttgaattccattgcctcttttctcatcacagaagtgatgttggaatcgtttcttttgtttgtctgatttatggtttttttaagtataaacaaaagttttttattagcattctgaaagaaggaaagtaaaatgtacaagtttaataaaaaggggccttcccctttagaataaatttcagcatgtgctttctttatgggagtcctaatttcaaccctaccaaaatgatcacaagacactatctgaggtgtcccattctagaaatagacccctcaaaatagcgtctttcagatctttttgaatgaatccacaagatgaaataaatgtcctattactgagtgcccgtgaactttcgccaaaccacacttagcctcaccacctgtgaacactgatattttattactctatttcactttttaaaacttctggctacaaccctctgaactgatcttgatgtcccactatagactgtagcccacaccttgaagcactgccctcgagggcgcaggaggggcgcatgctgtccagggaggaccaagaccttccggggttggaggggcttaaccgagtccttgtggcgtccatgacgcttctcctctcgtggttctgtgctctctgcatcttgaaggggtggtgggagggcgctctaggtcaggccttgcaccgcctgccctgggcttttctgtcaagtctccaacacacccctgtgtgggaacggggacagagaactgcccggctgaatttggccttcaggcccaatcctgctgcctcctgtgggtgttcctttcctgacactagactctagaagcccctttcctccctcctctattccaacaaggaggtcctggggtacaggcatctgggcgccccatgaggtccggcaagcagctggactctacctgcctcagagacacaggaggagtggccaggtgcagtgccacaggccagactgctttcgactgcttggaaccaaagaacttccatgtctttcccttggcccttcctagaaatcccttagggcttaaaactctcttccagaagcaagttgggcaaatagctcatctgctcctgccccgcctccctcacagcagatgccgcaaagggatcctggtgtcctcccagctgatccccgcatgcctcagcccactctccagtggtcattgcagctggctcggggttggtgaacaagtggaatctacttaccacgtcccagacaaatcagacacacaggggtctgggcgagcctgtggtccagggaaagagggcctgggagttgggcagagcctctccacctgcagcgctctgtgtgtggcagtgggcgcggcccctaacccctgcaagcctgcagagtctgcacatgcacctctgcccagcaggagtctttctccaccaactccaatatggactgtctcctatctcagtcatgttgaaaaaaaaaaaattgtgcctttggacttttttaaaaacttgagaattggccgggcacagtggctcatgcctgtaatcccagcactttgggaggctgaggtgggcggatcacctgaggtcaggagttccagaccagcctggccaacatggtgaaaccccctctctactaaaaatacaaaaaattagccgggcgtggtggcgggtgcctgtaatcccagctactcgggaggctgaggcaggagaatcgcttgaacctgggaggcagaggttgcagtgagccgagatcacgccattgcactccagcctgggtgacagagcgagactcctttcaaaacaaaaaagcaacaaaaaaacttgagaatcacttaattctaccataataggaagttagatgaagggaattctctgaagcccagttgagcttctgtaggtttctaatacaatgagcctttatatgtttctagtgcagaagctgctgctctgtgacccacttctcctgcctaaacctgccccttctcacggcaagggaggcctcagcccctccgctcctggcagctcaactccatccgggcctctggactctttccagggcgactggtgggcctcaccacagcagacactcttcaggctgctgccgccgtggcccttgaagctcagctgtgtcatgtgttcaattcttggggcattttacggcctgacaaaggccctctttttgttggaaaggccacccaacagtgggtcagtggcctcggcattcagtggccacttcacatctctgtctccctcgggttgctggcaccattgagaggtggaatgggctttataaaaaatcaactcattgctggtccaagtgcagtagtgtaacaagtaattgatcacaaccagttacagagttctttgttccttctgctgctttccttgaccagcctgaaaaaaaatcagctcaccgaaaatcagctcagagcttctcactatctcttcccctggtccacaagcttgaggaaggcagacagtgtggctgtccctagaaagggttcccctgggccatctcctgggtaaagatcaggacaaagggctcggcggttatacagacccataaacattaggggccggtgcagtggctcatgcctctaatcccagcactttgggaggctgaggcaggtttatcacttgaatccggaagttcgaggctagcctgggcaacgtggcaaaaccccatctctacaaaaaaacaaaaattagccaggcgtggtgatgcatggctgtgctcccagctacccaggaggctgaggtgggaggatcgctagagcccaggagatcgaggctgcagtgagacacgattgcaccactgcactccagccagggcaacagagcacgaccctgtctcaaaaaaaatacaaattgggcacagtggctcacacctgtaatcccagcactttgggaggctgaggtgggccaatcacttgaggtcaggagttagagaccagctcggccaacatggttgaaaccccatctctactaaaaatacaaaaatgagccaggcgtggtggcacacgcctatagtcccagctacttgggaggctgaggtagaactgctggaacccaggaggcagaggttgcagtgggccgagatcgcgccattacactccagcctgggtgacagagcgagactctgtctcaaaaaaataaataaaaaacaggccgggcgcagtggctcgcacctgtagtcccagcactttgggaggccgaggcgggtggatcacaaggtcaggagatcgagaccatcctggctaacacggtgaaatcctgtctctactaaaaatacaaaaaattagccgggtgtggtggcgggcgcctgtggtcccagctactccggaggctgaggcaggagaatggtgtgaacccgggaggcagagcttgcagtgagccgagatcgcaccactgcattccagcctgggtgacagagcgagactccgtctcaagataaataaataacaaataaataaaaattaggaattctacccttatcattcctgggtatgtgtgcctcttttcttcccacaacatcaagcccaggcctgcctgatgggtgcagcctccagggggcaggcccaccggaacaggacctatggggcttggccttagttcaggttctgcccttgggactctcctggactcgcttgtcctaggtcccaaagacagtggccacttggtcgagtgtcctttttgccaagtctccctacttggcacatcagacaacgtgagggaaatcataagtctctaaatttgtaaaaatgcccatgttccattcacatcggactcttccaaaaacaagtctgggtgtgagtagatgttgaaagaagaagtgaagcggtacttccggggtgggatacagactgatttcatgtccttggagggagaccaacaacctggcacctgaggagggaacaccttagaccccaggaggtggggggagaggggtggggagggtgcaatcagtcctccctctggcctccagacccagcaccgctgcttggccagactgtcacctgatcctcccaagtccagcagcatctgcagctgctattctgacccactataaaaacacacctgtaagctgggcgcagtggctcatgcttgtaatcccagcattttgggaagcccagcactttgggaagccaaggcgggcagatcacttgaagtcaggagttccagaccagcctggccaacatagtgaaaccccatctctactaaaaatacaaaaattagctgggcgtggtggtgcatgcctgttgtcccagctactcgggaggtggaggcacgacaattgcttgaacctgggaggcagaggttgcagcaagcggagattgtaccactggcaccccagcctgggcgacagagtgggactctgtctcaaaaaaaaaaaaaagaaaaaccccacacttgtagacatggccagtctagagccattctgcacctgaagccatcaatggcagctcctgaatgtggggccccctcccccaacacacaagatgtttctaaacgtagggacaggcccagccttgttccagtctggctggtacaaaatcataggcttctgatgcccaaggagctctgagctctaccccacgtagtcattgagcctgcagctcagtagcactgcccatggggcttaaccaaaccaatgctgtggtgttccaagtgacgtttcccaattcctgcctgggcacagtactcacgcctgtaatcccagcactttgggaggctgagatggaaaaatcgtttgagcctgggaggtcaaggctgcagtgaaccatgctcacaatgctaccactgcactccagcctgggcaacagagcaaaacaagaccccatctctaaaaacaaaaacagaaaaattcctgagctgggcaccctggacccctcaggttgtgtgtttgcatgtgggaaggtggcccacagaatgtctctcctctggggaggaggttgttttttgggtttgtaatgacaggcaatgacaccaaagatcagatcagacttgactcccttgtgtgaatcctagtgaagtgctcccaaacctttctggcaccaaggactggttttgtggaagacagtttttccacagaccagggtggtggggggtagggggtggtttcatgatgaaacttctacctcagatcatcaggcattagattctcataaggaagctgggtgcattggctcacacctgtaatcccagcactttgggaggctgaggtgggtggatcacttgaggtcaggagttggagaccagcccggccaacatggcgaaaccctgtctctaccaaaaatacaaaaattagttgggtgtggtgatgcacacctgtaatcccagctactcgggaggctgaggcatgagaatcacttgaacccaggaggcggaggttgcagtaagcagagatcataccactgtactccagcctgggcaacagagtgagactgtgtctcaaaaaaaaaaaaagattctcataaggagcatacaacctagatccttcgcatgcacagttcactatagggtttgcactcctatgagaatctgatgctgctgctgatctgacaggaggcggagctcaggcagtgatggtcactcgcctcctgtgcatctgggttcctaacaggctggggaccggtactggtctgtggcctgggggtttggggacccctgtcctagtgaataggagactgtgtctgggatgtctgaagtaagacctggtggtcccctcgcccctggaacctggcggcatggttgaggttaatgctgcagattggagtccagttgatcatagatgcttaatgagatgctgtatgaaacaacacatttggccccagcctctgttggtcagattcatcagagtggaagcagaatgacacattcattcaatttatcagcagctaaggtggtagaggggagtctctcattcctacaggtcttgctgaatgtaccaggaatgcatgaccctgatagctctctcccttggttttattttttttttctttctttctttcgagacagagtttcactgtgtcacctaggctggactacagtggcacaatctgagctcactgcaacctctgcctcccaggttcaagtgattctcttgcctcagcctcctaagtagctgggattataagggacacaccaccaggctcggctaatttttgtatttttagtagagatggggtttcgccacgttggccaaactggtctcaaactcctgacctcaagtgattgacctgcctcggcctcccaaagtgctgggattacaggcgtgagccaccacgcctggcctcccttggtcatttcttacggttgtgtttgcagcaagcacgttgaggggtgagggcaggctgcgtatagccaggcaggtccccaagcttagcatgcctctttcgtaacaacccactccctgtgcaggtgtccatctgggtccccggctctgcctctacagcccaggggaatcccacacatggtggcgtctgtgctgcttcgtgcgagcaggaaagcctttgtctctgaccctggagtctcgagacttctcccagcatttttgaaacagtaagaggctcacatactagcctgttaagtggaatcatatcaaatcccagacccagcagtcagctgggtggaggccaagcctgggcctttccagctgggttgtcagccccttggcacttcccacggacggtccgtcgagatttcctgacgatcaggatcccagaacatcaaggaccagagcaagactgactgtggtcagaggttccagtccagagctttcgtcttctgggaaaggaaactgggtccctgcatactgtgtgcttaaggtcatctgtctcccaagatgtggttgatttcaaagaaaacattcaggaacagggattatggtgtttacagaaccaaggcactatattcctgtgagcttcaggaaagaaaccaaaccagccttgctgcagccgcttttccagtccacccatcagcccttgggcatgcaggagtgtgagacctgccgggagggctagacagtgcccttcttggtcccacaccgtcttgccttcccaacgcagttaaattgacatccagaaatcttcctaaattgcagagattaagtaaaagctttcagggttagagtgtccctcggaaggatggctgctggtgaaatgttagagaaggggtaagctgacctagcagtggatgacatcaatactgctgccagctgggagcacaggtccctttttcctacaggggagaaggcactgtttataccctcaaggcattttaggcagagatcatcagggaataaacaggaaagggcaggctgggtgcagtggctcatgcctgtaaccccagcattttgggaggccaaggaggatcagttgagcccaagaattcaagaccagcctaggcaacatagtgagaccccatctcaaaaaatatatatatattttttgagatggggtctcaccctgtcgcccagactggagtgcagtggcgcaatcttggctcactacaacctccacctcccaggctcaagcgattctcctgcctcaacctcccaagtaactggattacaggcgccaagtaactggattacaggcgcccaccactacggcctggctaatgtttgtatttttagtagagacggggtttcatcatgttggtcaggctggtctcaaactcctgacctcaggtgatccacccgcctcagcctcccaaagtgctgggattacaagtgtgagccactgcgcccagcccccaaaaaattttttgtatgagccaagcatagtggtgcatggctgtagtcccagctactcaggaggctgaggtaggaggatcccttgagcccaggaggttgaggctacagtgagctatgatcataccactgcactccagcctgggtgacagagcaagaccctgcctcaaaaaaaaaaaaaaaaaaaagttactgggtgcggtggctcatgcctgtaatcccaggactttgggaggccagggtgggcagatcacgaggtcaggacatcgagaccatcctggctaacacagtgaaaccccgtctctactaaaaatacaaaaaattagctgggtgtggtggcgtgtgcctgtaatctcagctactcgggaggctgaggcaggagaatcgcttgaaccagggagttggaggttgcattgcagtgagccgagatcaggccactgcactctagcccggtgacagagcaagactccgtctcaaaaaaaaaaaaaaaaaaaatagaagaagaaaacaaaaactaacattgattgagcatcagtttaacttgtgccaggcaggttctgtgcaaaaccatttcctagatgagataagttttcctttttacagacgaggaagcagtagtccagagtggctagctgatttgtccacaaagcagtaagcggtagagcgactgacctccaggacccaaacttgcagcccctctgtgccggtggtgactcacccttagcacagtacctggcagcaggcgatgccacctgttcactaaggcatggcgagcagcacctctgagtcacaccattctgggtggtgcacaaagcagatgagttctcaccctcatggaatgcgcactctgcctcgagagacggacactttctctcatatcctgcgtccagttgcaggcaaagccacaatcattgctcacctcccagtcacactcagggtaaagagcaaaggtctttgatttacaagtccacacccgccacccgcctctcctcccctctccctcatctgcctctctccttctgctctctctgccactctgacctcagcgcagctcctcagacacaggcacattcctgcctcaggggcctttgcatttgctcttccctcttcctctatatgcttgcatcgcttgcctgcttgtcttcaggtctttttttttttttttttttttgagtctcgccctgttgcccaggctggagtgcaatggcacaatcttggctcactgcaacctccgcctcccgggttcaaatgattgtcctgcctcagcttcccgagtagctgggattataggcacccaccaccatgcccagctaatttttgtatttttagtagagagggggtttcaccatgttggccaggctggtctcgaactcttgaccgcctgcctcggcctcccaaagtgctgagattacaggcatgagccactgcaccaggcctgtcttcaggtcttttttattttattatttatttatttatttatttatttatttatttattttgagacagagtctcgctctgtcgcccaggctggagtgccgtggtgcgatctcggctcactgcaagctccacctcccgggttcacgccattctcctgtctcagcctcccgagtagctgggattacaggcgcctgccaccatgcccagctaatttttttgtatttttagtagagatggggtttcactaagttggccaggatggtctcgatttcctgacctcgtgatctgcctgcctcggcctcccaaagtgctgggattacaggcatgagccactgcacccggcccacatactacattttctatccactcaccagttgatgaagacttaatttgtttccagttttcttttttcttttttttgagatgggatctccctgtattgcccaggttggtcttgaactcctgggctcaagtgatcctcccacctaagcctcccaaagtgctgggatttgtttccggtttttttcctactatgctatacttttgactttgtttccctgactaggatgtcaattccgtgaggctggatttttgctgatttttttttttaacctctgtacccctagctttttttttttttttttttttttttgagatggattcttgctctgtcgcccaggctggagtgcagcagtgtgatcttggctcactgcaacctccaccccccgggttcaagcaattctcctgcctcagcctcccaagtagctgggattacaggcgtacgccaccatgcctggctaatttttgtattttttttagtagagacggggtttgaccatgttggctaggctggtctcaaactcctaacctcaggtgatccgcctgcctcagcctcccaaagtgctgggaattacaggtgtgagccactgtgctcagcctgtgtgttttgagacagggtcttgcttcgtcacccaggctggagtgcagtggctcaatcacagcttactgcagcctggacttcccaggctcaagtgatcctcccgcctcagcctctcaagtagctggaactacaggcgagtgccaccatgcctggctaagttttaattttatgtagagatggtctcagtatgttgcccaggctgatttcaaactcttgggcccaagtgatcctcctgccttgcttccctcccaaagtgctaggattacaggcatgaaccacttcacctggcccatgctatatgtttgcccctcgtcttcttacctactccctcagttttctcatctgtgaagcaggggttggaacagtaggggttgaatgtttgtgtcttccccaaactcctgtgctgaagctgagtgatggtatttggaggtaggacctctgggaggtcatcaggtgatgtgggtggagcccttattaatgggatttgtgcccttatagaaagggacacaacatgagatgatcttgctctgggccatgccgggaggaagggagaaggtggctgtcaacgagccaggaagcggcactcctgacactggatctaccaacacccctatctcagacttccagcctccaggaccgtgagaactgtttcctgttgaagccaccctctctatatttgttacagcagcccacactgattaagacactttttttttttttttttttttttttttttttgagatggagcctcgctccatcacccaggctggagtgcaatggcgcaatctcggctcactgcaacctctgcctcccgggttcaagtgattatcctgggtcagcctcccaagtagctgggattgcaggcacctgccaccatggctggctaaattttgtatttttagtagagacagggtttcaccatgttggccaggctggtctccaactcctgacctcaggtgatccacctgcctcggcctcccaaagtgctgggcgtgagccaccatgcccggcctgacacttatcttttatatctatatatttttttctttgttgagacggagtctcactgtgtcgcccaggctggagtgcagtggtgtgatcttggctcaccgaaacctctgcctcccaggttcaagtgattctcgtgcctcagcctccggagcagctgggattacaggcgtgagccaccatgactggcctaaaacacctaccttttattttttaaaaaaccaacacattatcagtacttcatgccagacaccattctaggaaattaactcctctgactttcacatcaatcccatgggtagctgttatttacagatgaggaaactgaggcacagaggtaaaacaactttgctgaggtcaccttgctgctaagtgacacagctggcatctagtgcagcaggctggctccaagtctatgcccctcacccctcagacgctgctcaccaagccggaggggctgtgggagcgagttagaacacgggacgcccctggcagcagcgccctgcgtgttaaagcgccgcggaggaagctgtattgtcgcggtacgcaggaaggcaggggcagcacctccctcttcaagaacgagcatctgagcttttgggggaaacctgtagctccccgaatgccatccacagagcccccctcagtcggcctcccctgaggcaccaaggctggcggaagcagtcacctgtccatctcccccacttctcacagaggaaatcctgggtggtgccgggcaatgagtcagggctgaggaccaggacagaggttgggtggggcgtctcagcattcctccaacgggcaggtctcagcgctcctccccctgctccgctcctctgcagggcccaggcgcccttggccttaggacccaacttctcttaccgccatggagttcgacctgggagcaggtgagctcctggggagtgtggactggaggtgcagggggccggactcaagcccagaagctgcctgcaccaaccacccaacttctctccacagccctggagcccacctcccagaagcccggtgtgggggcgggccacgggggagatcccaagctcagtccccacaaagttcagggccggtcggaggcaggggcaggtccgggtccaaaggtaagtcgcctcatcaccggctgcggaggggcgggaaggctggggttgcccctgaccccagggtcctgccttaggcctccaacttcagggggctgggtaaggggcgccgcctcactgccgcacctccatccagcaaggacaccacagctcttccgactccagcagcagctccagcgattcggacacggatgtgaaggtaaggggctctcgccagcgtccccaagcacgtgccctgcaccccagagaggcgtccccgcactggggctggcggggagggtgcggggagtggtccccctgtctcgcttccagcccagaaccatctcttctctcccatccctgccctcggccccacagtcccacgctgctggctccaagcagcacgagagcatcccgggcaaggccaagaagcccaaagtgaagaagaaggagaagggcaagaaggagaagggcaagaagaaggaggctccccactgaagggccctggacagggctcattaaaccttcctctctgccttctgcgactggtcagcgtggtgcctactctggcccgtccccagctccctgccccctgcccagcgctgggcccgcccattcgtgcgcgaggccaaggagaggctgtccacgccatgcccatcagggtttattgtttctgtaacagcggccacgccctggggcggtggcctgtgcagctggagatctctcagcaccttgggttgggggcggggctgggcgggacatgggatggaggcggtgcctgtggccagacagggtggaccttggggcctgcaggcaggagatgagttcggcggccacagtggcccccagcagcagcagcagcagcgggaggttcagcgggcgcgctcaccgcaccaggtggaaggtgagccagtacatgagcataggctgcgccgccgccaccgccatggtcaggtacatgcgcagctggttccgggccccacgcaccgggaccccctcagctgctgcgtctgccaagatcttcagccgcagcgtccggatctgggtgggaaagagagagaggaaccaagggatttacccttgagccctctgggccagagtgagagcccggacatacttccagcctctgcctagaagccccaggcagctggggacaagtccctggccctctgcagcctcaggtttctgctcccggggcctcagtttccccaaacctcctaacatggtgaggatttgcttctccccgggccctgtgggcaaaatctgagaaggttccatactcaaatgccaggcaaggtcttggagcgggtgaagggggacttcccggtggacacccggcctgagggggtgggagacgtggcccaggatgctgcccccccttatgctggccacacggcaatttctgaagacacgccagaaatgctatctttatttttattaaaggacagggtctctggcctggtgcgttggctcacgcctgtaatcccagcactttgggaagccaaggcgggcggatcacgaggtcaggagattgagaccatcctggccaacacgatgaaaccccgtctctactaaaaatacaaaaattagctgggcgtggtggtgagtgcctgtagtccctgctactcaggaggctgaggcaggagacttgctcctgaacccaagaggcggaggttgcagtgagccaagatcccgccactgcactccagcttcccgacagagcgagactctgtctcacaaaaaaaaaaaaaaaaaaaaaaaaaaagtcagggtctcaccctgtccgccaggcttgactgcagtggcgtgacctcagcttactgcagcctcaacctcccagactcaagtgatcctcccacctcagcctcctgagtagctgggactacaggtgcacactgctatgcctggctaatttttatatttttttagagatggggtcttgctatgttgtccaggctggtatcaagctcctggcctccagtgatcctcctgcctcagcctgccaaagtgctgggatcacagatgtgagtcacgtgcttggcctaaacttttaaatgatgagacttaagtcaaagtttatccaaggctctgccctggcccaccagccaccacagtctgccctctgcttctcacatgctcacagtgaatcctcccagcaccttgaggtgcaagtatcatcatcctattttacaaaaggggaaactgagtttattttttatttttatttttttttgagacggagtctcgctctgtcacccaggctggagcgcaggtgtgcgatctcggctcactgcaacctccacctcctgggttcaagcgattctcctgcctcagcctcctgagtagctgggactacaggcacacaccaccacacccagctaattttttgtatttttagtagagatggggtttcaccgtgttagccaggatggtcttgatctcctgacctcgtgatccgaccgcctcggcctcccaaagtgctgggattacaagcatgagccaccgcgcccggcaaaaggggaaactgaatttaaagaaaggaagtgatttgcccaggatccaactaagcttggggtccacccagcctgcagaccccagtgctcttcaccagcacccctgactccagtgggaagggctctagagaatctccttccagggaaattctggcaggaaggctcccatgtaaggagagtggaatgagagtgagagcccagcctggagcctgtgtgctggggatccccagcctctagcagcctggctggtgtctcctcttccagggctcaggataccccctcttccaggaagccctcctgaccccccaggccgggcagccactccagggctcctcagttcagcaatgtgtctctggtctgaaccccacacctgacatcctctgcttggatgcctggatgcctccggggcacctgtgcctcagcctcaccagccccgagcccagctcaccatgaacacaaagatggctacgcagcaccagcccagcaccaggtagtagccaatcttcccgaagagcaggcccatgaggaccccgccaatcatcctgggggagggagaggaggctgtgtgaggacaaggcccaagggctggggctggcgtgaagggcgggggtactcacccgacatatttgtagcccaagaaggccaccaggtcgatggtggtgaggtcggtgttgacagtgaccagatagaggctgagcaggatggccagcacctccagggtcagccaggccagggctgagctcgcttgcagccccaggaggtctggggagaacctgcaggcacaaagccccgccacttggttggctggttcagaccccccacccccagcacccatctggggacagctctgtgttgggtagggctggacacctggcagtgaccaagatggatgtgcgcgctatcctattcccacggaaatcccatccagagaggatggcagacccatccctagacagtgacacccagagcaggcagggctggagtcacagggggctgtgctgacagtcaggagacaggtgtcagagagggcttcccaggagaggggacaccgagctgaagcctgcaggaaggagctggtcagggacaaagcccttggcctctgccacatccccagggcctcaccagttagttaatgacagatgtgttcagtgccataaaggaaaagaacagggcgatgtgagcaagaggaggggcctgatctagcctggggggcaggaaggcttcccggaggaggtgatactggaatggagccagcagggatgtgcaggtactcggcagtagtggaggggaacacgctcctgggcagaggggagttgatgtgacaaggccccaggagacagtgccagccctcccaaggaaaggaatagaccggagcgtgcagcgggaggggcagtgccaggctgaggagctggggcttgattgggagccatggatagcagggcggggcagggtgggccaggcccgcacctcagacaggaccatcctggctgctgctggagtaggggtgcagtggggagctggtgatgacagagggaggatgaggatgggtctggtagtagaggccaagaggaagggtggatggagaagggtcacccagcacaggggatggtgacgcaatgcatgtgggtaggaaggacagggaagaggcgagggtgatgctgacagtgaccctgagggctgtatcttgggccaactgggagcaaagtggggctgtcctgaaaggggaactgagaccttggaactgagaccttcctgaccaaccatgggcctcccaaaccccaccttattcggcctgccccaggcctcccttacctatcctgggtccccagcgcaagaccagccaccaaaacgtaggtgatgaaagccattgctgtgggagacagacacacagacactggtcaccagaggaagaactgccctgggcctccaggcacccacacacccgctccatataggcccggaagagagaggagggtgcagggtagggggagggtgaaacctggaatgtagaggtccggggcattgacgtcaaagcggggggccaccggggtgtcctgttggtactgcacttcccagtcctgcggggatggggagacgggcaggaccctcagagccaggcccctcccaccctgctacaggccctcctccctcgaggcgaatctcccggctccaccatgcacctgcccccacccctgagccccccacaggcccactgcagacccacattcccctgggggtgctgacctggtgtaggtaggggaagaacagcaggcccagctttctgcccacatacatggtgtccacagcaaagtaatacttgagcttggtgatggggatgaagcggtcgatctggggaggcagagctcaagtctgaagccctgtggccccgtgcatccccccactcccaccagccccgcccactcacgttcttatccaccagctccttgccctgcgcggccaggctgctcccataggccatggccatgttggacaccgggtcagccaggaaggctgcatggggcgtgggagaggctgcaggataactcaggccaccaggtgcccgctgggccccatagccccggctctgggctgaacttgtgtcatcgaaaagctggtgggggtcggccatgcccggctgggacacagggatcctccgcttcgaggctgcaagggaagagagtgagaaggagctggggacccaggataggtaagggagacctggcgaacctcattcatcccacagctctgcctcctgctgcagaggagggtggtgtcaccattagagacactggctttgatgtcagatggactggcaggtgcaagctctgccattcatccaccaacccacccatctagccaactatccatccactgatacattcatctatgcatccattcatctacccacccatccatccacctatccatctacccaccctcccactcacccacccatccatccatctatccatctaaccatccatccatccatccattcatccatccatccatccagccatccatccacccacccatctagccaactatccatccactgatgcattcatctgtccatccattcatccatccacccatccatccatccaccctcccacccatcaatccatccattcatccatccacccacccatctatccatctatccatctacccacccacccatcaatccatccattcatccatccacccatccatccatccatccatccacctatccaaccatccatccatccaccacccatctagccaactatccatctaatgatgcatccacccacccacccacccatccatccatccacctacccattcatccatccacccacccacccatccatccacccatccacccacctatctagccaactatccatccactgatgcatttatctttccatctatccatccatccatccactcaccaagctatctatccatccaccaactcattcatctatccacccatctatcatccatccatccatcatcatccatccatctaaccatccattcacccacccacccatccacttatcatccatccatccagatatcaatgatgatgattatctcaaaagctactatgtgcgagaggaagggggggctattgggcacaaaatcctgtaccaagccttttacacaaggccgctgtccatatctcctatgctccccctcaatgacttggctccagccacctgcgcctcccaatgctcactgaatgcaccaggaaggtgcctgcctcaaggccgctgcaccagctgtgcctctgcttggaacgctcttcccccaacatcctcagagctccctcctctcctcctcaagggctttgttcagtgaggccttccccagccatcctgtctacaaccgtacctcccttggtggcactccccaccccctgccctgcttcactgatatccatagaactcggcactagctgacatgctggctgtcttattttgttcactgtctcccccactcaactgtgagtcccccaaggtggggatcttgatctcgttcacagctgagtccccagccccttgcacagggttagagtaggcacttgataaaaacctgatcaatgaataaaggcagcctgggcaacatggcgagaccccatctctacaaaatatagaaagattagctaggtgtggtggttcacgcctatggtcccagctactcgggaggccaaggtgggaggatcgcttcagcctgggagacaaaggttgcagtgagccgagactgcaccactgcactccagcctgggcaacacagtgagaccctgtctcaaaaaaaaaaaacaaaaaacaaaaaacagaataaatgaccactcccaatttacaggtgtggaaaccaaggcccagacagctaaaatgacttgtgcaaagggccaaactgagtgagtggcagagcaggagtccagccctgctgtgcctgataaatattacaataatcctgtggatgaactcatctcatcttcacaaccaccctgtttctgccagctgccaatgctatcatcatccccattttacatatgagaaaagcaagccctaaagaggctcaggcctttgcccaaagtcatagtatgagagccaggtttcaaaagtttttaaaaggtccctgtggcctcacgtggggaacagatgaggggtgggcagggaagggagagaggctgctggggtgatccaggtgggagaccatggcagacaggactgggggtgtaaaagaggaatgggttatttctggatcagtttcagagctaggagggacaggacttgctgaggggtgctcagaggaggtgtgttaagaagtgggaagaggccaggcgcagtggcttacgcctgtaatcccagcattttgggaggccaaggcaggtggatcaccaggtcagaaattcaagaccagcctggccaacatggtgaaaccccatctctactaaaaatacaaaaatgagctgggcatggtggtgcgtgcctgtaatcccagctactccggaggctgaggcaggagaattgcttgaaccgggaccggggaggtggaggttgcagtgagccaagatcgcgccactgcactccagcctgggctacagagcgagactccatctcaaaaaaacaaaacaaaacaaaacaaaaaacgtggtaagaggctgggcatggtgtctcacgtctataatcccagcactttgcgaggctgagacaggcagatcacctgaactcagttcaagaccagcctggccaacatagtgaaaccccatctctacaaaatataaaatagcagggcatggtggcgtgcacctgtagtcccagctattcaagaggctgaggtgagaggactgcttgaacctgggatgtcaaggctgcagtgccaagatcatgccactgcactccagcctgggcgacacagcaaggccctctttaaaaaaaaaagaagtgggaagagccaatactgtctctatagatcctggtttgagtaatgaggcaaatgggagtgctctctactgagatggagaaaatagggagggcgggatttgaacccagcactctgcctccagggcctctgttcctaatcaataaccaatgctaccctgcaaatatctgctgagatcctactatgtgccacccactattgcaggcacagggaatgagtgatcagatgacagtgggaatggggagaggaatcgaattatccacgtcatgactttctctgcacctggatgttctcatctacacaacggagttaactgtcccaccttgcagagctgttgtgacactcataaactccttggccccacagaaagcagtccatccatgtcactcctgatcagctactagcctcgaacccttcctctcaattattcgaagcctgaagacggacccaggtctcctcaattccaaggcaagcagcactggccccagcctctctgcaagccccacttcccttttctttcccctacttcttcttcttttttttttagacagattctcgctcttgtcacccaggctggagtgcaatggtgcgatctcggctcaccacaacctccacctcccgggttcaagcagttctcctgcctcagcctcctgtgtagctaggattataggcgcacgccaccaagcccaggtaatttttgtatttttagtagagatggggtttcaccattttgggcaggctggtctcgaactcctgagctcaagtgatctgcctgccttggcctcccaaagtgctgggattacaggcgtgagccaccagtgcctgacccagagtgatcttttttttttttttttgagacggagtctcactgtcacccaggctggagtgcagtggcgtgatctcagctcactgcaagctccgcctcccgggttcacgccattctcttgcttcagcctcccaagtagctgggactacagacgcccaccaccacgcccggctaatttttttgtatttttagtagagacggggtttcaccgtgttagccaggatgggcttgatctcctgacctcatgatccgcccgcctcggcctcccaaagtgctgggattacaggcgtgagccacctaacccggcccagagtgatctttttaaatacaaataagaccacgtcatcctctgcctaagatcactattcactgtgctctgaaaaaaatccaaaggcctgctaggccctgcatgacccactcctgccaaccaccatggtttgcaacctctcctggggatcccatgcaccagccagccacatggcctttcaggccccgactctgccaagctccttgcccccactggcttttgaatatgcagagctttcatcctggaacaacctccctccatcagcacctcccaatatcacacagaggcccctgcctttgcagagaccttcctcactcctccctgtaatgcactaacctcgtctggttccttctcataacatgtggtgctttctttttctcttctgagcactcacaataatttctgaatatatattcatatgtctacttgtttacttggcacaggcctccaatgcctttccttctctctctcttttttttcttttcttgaggcgttgtttcgctcgttgcctaggctggagtgcaatggcgcaatcttggctcactgcaacctccgcatcctgggttcaagcgattctcctgcctcagccgcccgagtagctggaattacaggtgcgcgccaccacgcccggctaattttttttttttttttttttgagatggagtctcactctgtcacccaggctggagtgcagtggtgaaatctcggcccactgcaccctccacctcccaggttcaagcaattcttctgcttcagcctcctgagtagctgggactacaggcgcacaccaccacgcccagctaaattttctatttttagtagagatggggtctcaccatgttggccaggctggtctcgaactcctgacctcgtgatcctcccacctcggcctcccaaaatcctgggattataggtgtgaaccactgcgcccaacctaatttttttgcatttttagtagagatggggtttcatcatgttggccaggctggttggctgggcaccgtgactcatgcctgtgatcccagcactttgggaggccaaggcaggtggatcaccctctttttttttttttttttttttttttgaggcgaagtcttgctctgtcgcccaggctggtgcaatctcgcctcagtgcaacctctgcctcctgggttcaagtgattctcaagcctcagactcccaagtagccgggattacaggtgctcgccaccacacccggctaattttgtgtacttttattagagataggattttgctgttacccaagctggtctccaactcctggccccaagtgattcgcccacctcgacctcccaaagtgctgagattataggtgtaggccagcacgcccagcctgccctctcactacaaatctccttctcctgggtaacttttcatgatcagaattatcctcttccatgccgggtgcggtggctcacgcctgtaatcccagcactttgggaggcctaggcgggcggatcacctgaggtcgggagtttgagaccagcttgaccaacatggagaaaccccgtctataccaccccgggcgtggtggcctgcgcctgtaatcccagctacttgggaggctgaggcaggagaatcgcttgaacccgggaggcggaggttgcggtgacctgagatcgcgccattgcactccagccttggcaacaagaacaaaactaggtctcaaaaaaaaaaaaaaaagaaaaagaagtatcctcttccaggaagcttcactgacacccctaggctgggtcatgtgcctcctcagggctcccacaacatctccatcccaacacagggcctgacacatgggagttgagacaagttaggttgaatgaataaatgaaacacacagcacactcacggagatgaagagacaggaaaagggggccaacagcacaatacaggttcgcttcttaaatgagcggtaggcatggccctctgcgctcccggggggccacgaagctgtcctaagggtgtgggcgacagcaggcgggtactggggagccacggaagggtggggagcagggaagggcggatcgctaactgcaaatgaatgaaagttgcatttctctgcatatcgcacgctatccagtcccaagttgttttcttctaaaggaatttcctaaagaatcgccccccaaggggcctcctacccgaacctggcatcccagcgctgtgcacacctcagggttccagatccttgatctcgtgacctctgacctgcagtgacctcgccaaccgacgcggccgccccgccacgcccccgcccgcccgatctcctccgccggccacgtacgccacttacgcagccggggcgtccccgcagccgccgccgccaagcctgccgggtgcatccttcgccgccgccacctaagccgcggttcggagcgtgcccgcccggctcccgtacccacgccccgccggcgaagagacagccaatggacgtcaggattgagggaaggcctcgcccccacccccccgacccctccagccccccccttcacggaggcctggacgactgggcggtgccttacgtaagaggcggagactgggctactgggctcatgcagtaaagcgagtcaaggcctgagtggcaggagggcgaggccgggaccaatcccaggaggaggcggtgtctgccacgacagaaaatgagtgtctgccccttgccggggctcacgcccctaactccagcactttgggaggccgaggcgggaggattgcttcagcccagggattcgagactagcctgagcaacatagtgaccctcgccccgccccatccctacaattttttttttttttaatttagccaggctcagtggcttaacgcctgtaatctcagcactttggaaggctgaggatcgcttgagcccaggagttcgagaccagcctgggcaacagcgagatctccatcgctacaaaacattttttaaaatgtaaatatcgagcgaaaaggtcgatgggaaatgcagttctctgcagacagccgttcagtttgggtcattgagagcactggagagccagaaaaggctgtggagcaaggaaaagagaaacatttgtgttcctgaggggctaattggagttgtaggggcttatacaatttttgacatcccttaggtattaaagtaaatatttatttattttgagacagggtcttcctctgttttccaggctgcctcggaccccctgagctcaagtgatcctcctgcctcagcctccccagtaactggcaccacaggcatgcaccaccatgcccagctaatttttaaattttttgtcaaaacaggatcttgctatgttgcccaggctggtctcgaattcctgggctcaagccatcctcctgcttcagcctcctaaagcattaggattacagacatgagccacagtgcccggccttaaagtgaatatttagagtgagaaaaggaaacccaacaagttaggtgagaagaaccaggtgtctctcttggaatagatcttaaggcagtttcccagaaattcataaaaatgttctcacattgcaacctggttccctctgtccaccaaaagcattctacaacccccagcaactcacagcacacaggcgcacctgcaagtgaagagccctgcccacctagcgtccttagtctctcctctctctgactctcagtctccccccttctctccctctcagactccccgacttatctcaggaaaacatagtggtggaagttacttctgcgcagcgatagcgcatccggaaggatgtcagcaagtgaccctatcgctgtggcttcctcttcctcctctgagacgttgtctttttggagaccttaagggctgctcctggtttctcagtgatgagtgctggctccactgtggttcctttttgtgagcgaaatgcccgcattcttcttcacctctgatttagcctctgtcccctgggctccaacaccattttctcctcatcctcagccctctcttgctctggttgctccagatacatctcttccataaatgtttttttttttcttattgcttttttgtttgttttttgagatggagtcttgctctgtcgcccaggctggagtgcagtgatgcgatctcggctcactgcaacctttgcctcctgggttcaagtgattctcctgcttcagcctcccgatagctgagattacaggcgtgtgccatcgcacctggctaattttttgtatttttagtagagacagggtttcgccatgttggccaggctggtctcgaactcctgacctcaggtgatccacctgccttggcctcccaaagcactgagattacaggcatgaaacaccgcacccagccttatgtatatatatttaattaataaagcaagtactgccaagtgcagcggatcacgcctgtaatcccagcactttgggaggccaaggcgggcagatcacctgaggtcagtttgagaccatccttgccaacatggcgaaaccctgtctctacttaaaatacaaaaattagctgggtgttgtggcgggcatctataattccagctacttaggaggctgaggcaggagaattgcttgaacccaggaggcagaggttgcagcgagccgagattgtgccattgcactccagcctgggagacagagcgagactcttgtctcaaaaaaaaaaaaaaaaaaaaaaaaaaagcaagttcattagttcattggcttcctgctggcctcatgttcaccccttaccagttgtgtgactactactttttatttttttgaggcagggtctactctatcacccatactggagtgcagtggtgcgaccataactcattgcagtctctaattcctgagctcaaacgatcctcctgcctcagcctcccgagtagctgggactacagacgcatgccaccacacttggctaatttttgtattttttgtcgagatggggttttgccatgttgcccgagctggtctcaaatgactacttcatttttaagcctaaattttctcatctgtttagtgggaattatattgggacggggttgagaattcagtgcaagttcaggtgtccacagggcctggcagaatgtaagccttcgatcactggcacctattgtgttactgattctattatcaggtgcctctgcttctggattgtcaaccccaagttgggctctgcccggtgatctgccagctctttaatagaaccagctgggacatgtctgagctgagccccaagccccactcctctgccagtcggatggggttaggactctgggctgccctccaaaaggctgtcaggaaggcgctgagttctggctggaggcagaagtggagagacttacgggggggcgcagaaagaaaaatttcctcttaaatagaggcgtgtatttgtgattctgcctggcttgtttccattcatccttcatgcttcagctcagctagccccttcctcaggaagctctcttgacctccctaggcaggggtggttgcttcctctggactcccagggccctctagggctccctgattccaggcttgatcattgtacccttgcttccctcatcacagccctgaccactctgggctgtcttttttcttttttttagagatagggtctcactctctcccaggcatagctcactgcagcctcgaactcctgggctcaagcaatcctccgacctcagcctcccgagtagctgggacaacaggcgtgggtcactcttgtgtcagtctcccagttagactgggagccccatgaatgcatggcgcaggatggtctcatcattactgagtctccaggatcatccagcgaggggtcagcagaaagtgggcattgaacaaagctttggtgagtagctgaggatccccactctgtccacacgggcacaggggacacctgactctgtggtgtccgctgttcccactccgaggctcacaacttggcgaatggagcgagaattggatttcagtttgccccttgctccgtcagccgcgcgccctgatgcagtgcacaaccttagctgctgtgcgcgatggggggcgactcctcggcctgcgagcagagaggaaagttcagattcttctaacatagagaaccagccttccaggaggacgagaaggaaggaatgaggggaagagaggactacctccaccctttccatcccgttggtctgctgggtctgggagcactgggctccaccctctccgaacgaacacctggcggttgggcgtgcctcagtttcccggaggcggggcattcctccgtcgccgccccccacctcccctttttcctcttcctcttggggcatctgctgccgcgcctgtagcactcccggaactggaactaggtgccagacggtccggaggcgggggccacgtcagcggggccacccagggctcgcggggtcccggtgggtgccatgcggaggggcgcgcttctggcgggcgccttggccgcgtacgccgcgtacctggtgctgggcgcgctgttggtggcgcggctggaggggccgcacgaagccaggctccgagccgagctggagacgctgcgggcgcagctgcttcagcgcagcccgtgtgtggctgcccccgccctggacgccttcgtggagcgagtgctggcggccggacggctggggcgggtcgtgcttgctaacgcttcggggtccgccaacgcctcggaccccgcctgggacttcgcctctgctctcttcttcgccagcacgctgatcaccaccgtgggtacgtaagcgcctcaccgcaaggcggcgaggacccgggatccccacttcatccttaacccctggggaccccggggccctcacgaatacccttatcccaatcccctctgggcttcggatcccccgaaaagaccccagtgaggacccgggacccaggctcatgatatctgctctgctcggggagcccaagtccgagcccttcctcctaagtaggaaacacccagctcccctcagagtacctttgcagagaccagctgggaccccgttcctcggtcttttttttttttcttttctttttctttttttgagacagggcttactctgtcgcccaggctggagtgcagtggcacgatctcggatcacggcagcctccgcctcccggtttcaagctattctcctgcttcagcctgccgagtagctgggattacaggcacataccaccatgcctggctaatttttgtattttcagtggagacggagtttcaccatgttggccaggctggtcccaaactcctgacttcaggtgatcagcccgcctcgccctcccaaattgctggcattacaggcttgagccactgcactgggactgcattccccggtcttaatcctcttggtgacccgggtctgtccagccccctctaagcctaggactgtcctcagagacctccagcaaggacccaggacacgccaccctccaagggagatccttgccccctctggacccagaactcaaccatgccaggacccctgactttatctctagtctgggcctgccacccttgccatgtctcctgaccctccagatatgtccttctgggaaacccccctggagaaaccccatctcaacctcctcctgaccctggcgccttagcgaggaccctaaatctccagacctctcagggtgtcctcactaaagacctccctcccaacagagattcctcagcaaggacctggcaccgccatctgggactcctggccctctggacctgggcctctgctccagactgtcatctgtctcctggccccatactccccagcaggcaactctgaccccagacacaaaacccttccctaggtaccccaccccatcttgacatctcccctatatggggtcactctcaatgcaggattttcctcccaatagggacaccacctgttccctctggacctgggactcccaattcagcagccccagctagggatgtgtcaaaaggacccaccgtggagggaccccgagttttgggaaaccctgagaagccagacttgggaaatctctttgttgccaggctctgctgctcccccagccccttctcagctcccagacttcctctttgtttctttgttggggatttgttgaggagaggaggctggtgcagggttagcccagactcctaactcgccctcccggccaacaatagggggcagcttttgcttttggtcccctggcagcagagctgggtgacttctcgttagctgacctcccctgggtctgcccatgctgccagggcggcctgacctgcttctgagcttccctgggtcatgtgcacgcctcctacctcttcccagatcctggcttctaagaagtcatccctggcagggcagatgagggaagccagacacacgtcaggcacagcctggctacatccctgctcagccgcggctcattgccaggcctcagtgtcctcccccattgctaaaatggagataataacactccccatttccctgtaatagcagtagcctgacagaggacttgccaatgcatgctttaactcacttaatcatcacaacagccttgtgaggcaggcgcctttataggctgtatatttttagccatggaaaccgaagcctagagaagttgggtaactttcctaaggtcacacagcaaagacggcatagagtagagatttagtcaaggccatcaggctctagagtcccatgctgctagccaacacaccacactacttagaagaagggtgctgtgtgtgttgtaaaagaaaaaaatatgctaacacttgttaaaaatggaaagttattgtggtagaggagagaccattgcaaaggccagagagactgaactcaactgtgaatatagcaaacacagctggagttttatggctaacaagtagaataagggagtcagtggatggaagaatactaagaggagagacattcgggtagggggattcttgctaaactcagcttaacaagattcttgctaaagacaggccaaggacttagatattgagagggggtggatgagggccaggcgcagtggcttacgcctataatcccagcactttggagggccgaggtgggcagatcacctgaggttaggagttcgagaccagcctgaccaacatggtgaaaccccgtctactaaaaatacaaaaatcaaccgagcattgtggcaggcacctgtaattccagctactcgggaggctgaggcaggagaatcacttgaacctgggaggcagaggttgcaataagctgagattgtgccactgcactccagccagggcaacagagtgagactccatctcaaaaaaacaaaaaacaggccgggcaagttggctcacgcctggaatcccagcactttgggaggctgaggcgggcggatcacctgaggttaggagttcgagaccagcctggccaacatgacgaaaccccatctctactaaaaatacaaaaattagccaggcatgatagtgcgtggctgtaatcccagctacttgggaggctgaggcaggaggatcacttgaacctgggaggcggaggttgcagtgagccgagatctcgcccctgcactccaggctgggcgttagagcaagactctgtctcaaaacaaacaaacaaaaaagagtggtggatgaggaatttgatcagatatcggggtgggtggcttgtaggattcttgctaaaactgggcctacttaaggactcaggagtcagactgaagtgcggtcaaggagggagtctttgtccgtgcgaagcgctggtaataactgatgtttattgagttaatgttgactgttttcatagtgggtgaagccttgaatgcatctggagaagtggaaaaccaattaaacgtgattcagagagacctcttcccacaatgcccctcgtttggtcataggcccaaatcttggccctggaattgatctgggcagccttgctgcacttgaggcaggaggaagcgggtagtcctacccggaactgggaatcggagagaggaagtgagcattacaatccttgtaactctttccacgctcttgctaggcactatgccctatcccagcctagtaggattactaccacatttgaggaagggattgttttttgtttttcagacagggtcttgctctgtcacccaggctagagtgcagtggcgcagccttgacctcctgggcttaagtgatcctcccacctcagcctcctgagtagttggaaccacacgtgcacgccactgcacccagctaatttttttattttttattttttgtagaaggtggtctccctatgttgctcaggctggtctcaaactactcctaggctcaagcggttctcctgccttggcctcccaaagtgctggaattacaggtgtgagccaccttgcctggccaggaagggattgcttacgagcccatttttgcagagagggaactgagcctcagaggggagaagtcatctggccaaagtcatgcagggagtaaatggcaaaacactgttttggactcttctctttgaaatagtaacttgaggctcacaggccccatgcttttcaaactctatgatttgtctatttataaagatctcttttattattattatttttttttacagagatagggtcttgctatgttacccaggctggtgtcaaactcctgggctcaagtaatcctcccactttggcctcccaaagtgctgggattataggaatgagccacctcacccagcctgtttataaggatttcatgtcatttgcaaacctgccaggctgctggagtttccccatcaaaaacccttgtattaatgagggttgggggtcataagtgatacacctcaaattacagttgcttaaataagaagtgtatttcttgttcacattccaggtagtcagtccaagtcgtactgcatggtcagagacctaggctccttctcagcaaaaccctggtgttcctgcctaactcctctgcgcaacttccattcccaaggtcgcctaatggtccaagatggctgtgtagctccagcctccatgtctgtgctccagccagcaagaggagggaggaaagaagggagactggcatccctcgctccttaaggacccttcctggaagttgcctgactctttcatgaatacctcattggccagagattagtcacagaaccacacctggctctgcaagggaggagggaacgtcctgattccaaaaggccatgtatccagctaaaacccagggggagccttttaaaattattattattgttattattttttaaagtagagatagggtcttcctatgttacccaggctggtctcaaattcctgggctcaagtgatcctcccaccttagcctcctagagggctggggttacaggtgtgaaccaccatgcctggctgggatcatttcttttcccaagttttttattatagtaaaatacacataacataaaatgtaccatcttagtcatttttaagggtacagttctgtgacattaaatacattcatattgttaccatcatcaccttcatcttttttttttttaatagatacgaggctggccatgccatgtgggagatggagttattgctcaactcaaatcactctccaccatccatctctaaaacttttttttttttttgagacggattcttgctctgtcacccaggctggaatgcagtagcacaatcttggctcactgcaacctccacctcccaggttcaagtgattcttctgcctcagcctgctgagtagctgggactataggcgtgagccaccatgcccggctaatttttgcatttttagtagagacggggtttcaccatattggtcaggctagtcttgaactcctgacctcataatctgcccgcctaggcctcccaaagtgctgggattacagacctgagccaccacgcctggcccattgtctcgcccattttagaatagggcaagctgaggctcagagccaggcaagagcctgcacccttcattctttgttttgagaagtactgatcgagcgcccacagcagtgatgaaacacgcagaacctcctgctttgctgaactggcagcctatgagaagacggtaaaccatagagcatgctagaaggtgttaagtgctatgggaaaaaaaagtgttgggtaagaggatgttaccatttagggtgctcaagggaaagcctcactgagaaggtgacatttggatgaagaagacctggagaggagagaggggagcattctttggggaaggaacaaccagtgcaatggccctggggtgggagcgtgctgccctggtggaccctgtggggcttcatgggtcatgatgaggactctttccttttacctgagtgaggtggggccacagaggggctctgtgcagggaaggggcatgactgaactcaggtgttggcaggctctgctggctgaacagattgtaggggctggggatggggaagggagacccaggaggaggctgctgtggtggacaggaccagggtgggggccatgggactgggtgggggagaagtaagtgggttttgggcctatttgaaagttgagataataggcttcactgacagatggagtgcggcatgagtgacgagggcgtcagggatgaaggcaaggctcttggcctgagcgtcgaaggacagaggtgccatcacctgggacaggaggggatgtggggagaggcaggtttgggatgaagccatgtgtaggtgtgggtgtccgcagacctctcgctgcaggtgttgagtgggcaggagggttttccctggctgggtcctggggatcagatctgtaactccaacaccttggaaggcaaaggtgggaggatcactagagtccaggagctcgagactagcctgggcaacatagtaggaccccatctctacaaaaaaatttaaaatcaacggggcgtgctggacatgcctgtagtcccagctacttaggaggaggctgaggtggtaggatcacttaggtccaggagttcaagactgcagtaagctatgatggcaccgctgcactccagcccgggtgacagagtgacccccatctctaaaaagaaaaagatttaccctttactctctttactcccctaggctatgggtacacaacgccactgactgatgcgggcaaggccttctccatcgcctttgcgctcctgggcgtgccgaccaccatgctgctgctgaccgcctcagcccagcgcctgtcactgctgctgactcacgtgcccctgtcttggctgagcatgcgttggggctgggacccccggcgggcggcctgctggcacttggtggccctgttgggggtcgtagtgaccgtctgctttctggtgccggctgtgatctttgcccacctcgaggaggcctggagcttcttggatgccttctacttctgctttatctctctgtccaccatcggcctgggcgactacgtgcccggggaggcccctggccagccctaccgggccctctacaaggtgctggtcacaggtgagctgggtggctagggcagggctttgaggaggacctagccctgtccctgggggagttaaaggctcacagtcccactctgggacttccaaaagggatccaaccccaccctgcagggtccagtagaactgcggccccgcctggaaaatctgagccccaggatgaccaacgccccttctccgcctttacagtctacctcttcctgggcctggtggccatggtgctggtgctgcagaccttccgccacgtgtccgacctccacggcctcacggagctcatcctgctgccccctccgtgccctgccagtttcaatgcggatgaggacgatcgggtggacatcctgggcccccagccggagtcgcaccagcaactctctgccagctcccacaccgactacgcttccatccccaggtagctggggcagcctctgccaggcttgggtgtgcctggcctgggactgaggggtccaggcgaccagagctggctgtacaggaatgtccacgagcacagcaggtgatcttgaggccttgccgtccaccgtctctcctttgtttcccagcatctggctgggatgtgaagggcagcactccctgtccccatgtcccgggctccactgggcaccaacataaccttgttctctgtcctttctctcatcctctttacactgtgtctctctggctctctggcattctcgctgcctctgtctttccctcttgctgtctctgtttctcattctctttcatgttccgtctgtgtctctcaattaaccactcgtcaactgctgattctactgggctgtgggctcagacctcatttcaggcaccagattggtcgctacaccctggacaagtgactgcccgtctctgagccttgatttcctcagctgccaaatgggaagaatagaagaatttgcccctaaacccctcctgtgtgctggccctgtgctagacagtgctggagacatagttgggggtggagaactgcccttatggagcttgcagtccagtgaggtggacagacctgtccccagacagtgatggcccaaaatggtcaggactttaatggaggaggtgaggtgttgaaagcacaggcagagtggtcagggctgaagtcggagaagcatagggactaggcccaatccagcctggaaagtcagggaggacttcctagaggaagggacatcgaactaagacctgaactatgagaaataggcaggaagaagttgtacctgactcatttttctcaggtgtctccagggagcaggacccatggagggacccctggtgtaggcctgggcgatagactcttcctcagcagcctggcaggcaggaaacagacataggaccccagcccagatctgaatggcatgggaggtgctgcccttaaccatgacaccattgtaagagctgtccacatttgtatgttgtgccctggaatcagcctggttgagctcaaatcccaacttagccacgtctggcctgtgtccttgggcagtcacactacctctctgattttgtttccttatctgtaaaatggtgatcatcataatacaacttcaaaaggatttcaggctgagtgtggtggctcacgcctatacacccagcactttggaaggctgaggaaggaggatcgcttgaggccaggagtttgagactagcctaggcaacacagtgaggccttatctcaacaacaaccacaaaatctaaaaattagctgggtgtggtggtgcatgcctgtgatcctggctacttcagaggctgaggtggaaggatcacttgaggccaggagtttgaggctgcagtgagttatgatggcactgctgcactccagcctgcgggacagagtgagaccctgtctgaaagaaagagagaaagaaagaaagaaagagagagaaagaaagaaagaaagaaagggaaagatggaaggaaggaaggaaaaagaaagagaaagagagagagagagaaagaaaaagaaagaaaagtaagaaagaaaaaagaaaaagaaagaaaagtaagaaagaaaaaaagaaaaagaaagaaagtaagtcctggctaacacggtgaaaccctgtctctactaaaaatacaaaaaattagccaggcgaggtggcaggcgcctgtagtcccagctactcgggaggctgaggcaggagaatggcgtgaaccccggtgggggcggagcctgcaatgagccgagatcgcgccactgcatccaacctgggtgacagcaagactccgtctcaaaaaaaaaaaagaaagaaagaaaagaaaagaaggaaagaagcggggcacagtggctcagtcctgtaatcccagcaccttgggaaggccaaggtgggaagatcacttgaggctaggagtttgagacaagcctggccaacatagcaagaccccatctctacaaaaataaaaattttaaaaagggctggggcatttgagctgggtcccaacagtagacaagtagaaaaggcatggagagggcataccaggtgggaggagctgtgtgcaaaggcctggagatggaaaagcatgctggccaccagcttctgacaagcagtttagtatgaacggtatgcagggaaagagggaaggagggcagaggggtgcgcacgagcacccgttagtgtccttaaatgaccagcatgggaacctggtctctttcctgagggccctagagagccatggaagggtttagagtaggagtgggtcatggttaggtttgggttttaggatgatccccctagttgctctggagaggtggagcagagcgggtactgaggctgggtgcctgtgggaggctgaggcaggaatgaagagggagacgatgggcctgggctgagccatggaagggaggaggggtgagtgcgggcacactcaggagccaagtggacaggccatagcccccacagactggagggacgcggctagggaatgtcccacagagtggccagttatccctgagagaaagagcaggttttagcggagacgctgaggctgctttagaatatggtgggtgtgtggggcaaaagggacacccaggggtgtatcaagaggtcatagggggcaggccaggtggctcacgcctgtaatcccagcactttgtgaggccgaggcaggtggatcacctgaggtcaggagttcaagaccagcctggccaacatggtgaaaccccgtctctactaaaaatacaaaaattagctgggtgtggtggcacatgcctgtagtcccagctacttgggaggctgagacagaattgcttgaacctgggaggtggcggctgcagtgggccgagatcacaccactgtactccagcctgggcgaaacagagactctgtctcaaaaaaaaaaaaaaagtcataggggctgggcatagtggctctcacctataatcctagcaaatcgtagtactttgggaggccgaggcaggaggattgcctgagcccaggggttcaagaccagcctcagcaacataaaatacaaaaaatacaaaaattagctgggtttggtggtgtgcacctgtggtcccagctactcaggaggctgaagtgggaggatcacttgagcctgggaggtcaaggctgcagtgagctgtgattgcatcactgtactccagcttgggtgacagagcaagaccctgtctcaaaaaaaaaaaaagaaaagaaaaagaaaaagaaaaagaaaatatgtatattggatatactatgtgccaggcacgattccaagcccctgatacattctctacattttacagatgggggaaggaggtccagagatgttaaatacttgcccaaggtcacacagaaagtggaacactgggatttgaacaaggttttggttgggcatcttttcctatgggagctcagaaatatctgttgtctagccctttctcagcctcccaaccttctcggttccttacctatgtcacagctgactttgagctaaagtcatctcggggcagctaggtgcctatgtgagctggcgttcatttctcactgtttctccttccaaatacctccaggaagaaaagcaagtcctttttggtccaagacattaaaaaagccaggctcagcggctcatgcctgtaatcccaacacttggggaggctgaggcaggaggatcgcttgagcccgggagctggagaccagcctggacatgttaacatagcaagacccctctacagaaaatgttaaaaatgagctgggtgtggtggcgcacacctgtagtcccagttactcaggaggatgaggcaggaggatcacttgagcctaggaggttgaggctgcagtgagccatgatcacactactggactccagcctgggccatagagcaagaccctgtcctaggagaaaaaaaagggccaggcacagtggctcacgcctgtaattccagtactttgggaggccgaggcgggcggatcacaaggtcaggagatcaagaccatcctggctaacacagtgaaacccgtctctactaaaaatacaaaaaaattagctgggtgcggtggcacgcacctgtgatcccagctactcgggaggctgaggcaggagaatcacttgaacccaggaggtggaggttgcagtgagccgagatcccaccattgcactccagcctgggagacagagcgagactccgtctcagaaaaaaaaaaaaaagaaaaaagtgtgtgctaaaaaattcatcaggtactaaagagtgtacggtggaaagtaagtctttctcctacactcagatcatggatggatgtctcaggtcttcccaggcacatttgatgttatgtaccagccatatgcatgtgtgtgtcatttatttttcactctacacaagtagtacctaatatggtgaggttgttatgattacagactctggaggcaaagttcctgggtataaatctgaactctgtcactcccaagctaagtggctttgggcaagtgatttcacctccatgtgcctcagtttgctagtctgtacaatgggatggtaatagcacctacctcatggacttgagaagtcagcaacttcatacctctaaagcccttagagctagcagtgtgtggcactcaataaaatgttgactaatgatgattctcacttctgtactatgctttttcgtaccaattataaatattaatattttaatgtcacctttcttttattcatgtttctgtaccttgcttttgtcaccaacacagtgtaattcagagataatttcagagacatacaataggtctttttttttttttttcttttttgagactaagcctcgctctgttgcccaggctggagtgcagtggcacgatctcagctcactgcaacttccacctcctgggttcaagcaattctcctgcctcagcctcccgagtagctgggattacaggcacctgccactatgcccggctcatttttgtatttttagtagagacagggtttcaccatgttggccaagctggtctcgaactccagatctcaagtgatccacccgcctcggcctcccaaagtgctgggattacaggtgtgagccaccacacctggccacaataggtcttatatcttacggtgtctcctctaggacacatttcccataaataatttcaacatcccctgttgatgatacgtgggtgttttccagtcttttgctggtacaacaatgctacagcaaacatcttatggtttaagatctaatgaagggatcgaatgaggcaggagttcaagaccaccctgggcaacatagcaagaccctccctgtacaaaaaatttaaaaattagctgggtgtggtggaacaccagctagtcaggaggctgcggcaggaggatcacttgaacccaggtgtttgggactagcttggacatcatgtgagacctcatctctgctggacatggtggctcatgtctgtaattccagcactttgggaggccgagatgggaggattgcttgaggccaggagttttagaccagactggtcaaaatggtgagaccccatctctatttttttttttttttaaaagatgaataaaggtcgggtgcaatgaagcacatctgtaatcccagcactttgggaggctgaagcgggtggatcgcttgaggtcaggagttcgagaccagcctggccaacatggtgaaactttgtctctactaaaaatataaaaattagtcgggtacggtggcagatgcctgtaatcccagctactcaggaggctgaggcaggagaattgcttgaaacggggaggtggaggttgcagtgagctgtgatggcaccactgcactccagcctgggcgacagagtgagactttgtctcaacaaaaaaaaaaaaaaaaaaagggaaaaaaagaagatgaaaaagaaacccccatctctaaaaaaaaaaaagtaaaaataaaacaaattaactggatatgatgactcgcatctgcagttccagctacttgggaggctgacatgggaagatcacttgagcctgggagttcgaggctgcagcgagcaatgattgcgccactccactccagcctgggtgagagagtgagaccccgtttctaaaaaaacaaaataaaaaaaaaagggctctggtacatggctactgagtttcttcccctagaagatgtcaccgttccctagcctgcgggggtgggctggggtgggaaggatagaccaccatcatcggttcatttacataaaacaactattatatgcggtgcctggcagggctgggggacaacagaggcagagaaagccatacaccctgccctcacggagcttgtgatccagtggaaaagaaacacccatttccagtcatgagtggcctagaggggccaagaggtaggatgagggctggtcatgtatcacagagaagacctaaaggaaggaaagtggtgggccctgttaaaaagcatggaatggtattccagagggcattactgagtctgcacaggtctggagcatgcatggctcacacctgaccaaggatattcaagtcgctccatgtgaccagactgtggaccacagaggtctaagggggagagggcagatgagccagatagaatgacagggaggagagtatgaggggctctggaaaccgaggggtttggaagttttcctgagggcctagagggtcatggaaggttctagagcactggttctcaaggtgtggtctccagaccactagtatcagcatcacctaggaacttgccagaaatacaaattatcaggccccactccagatctactgaatgaaaaattctggaagtagccaggtagttactcaggaggctgagatgggaggctcacatgaggcctgaaattcaaggctaacctgagatagggtgttgctcttttgcccaggctgaaatgcagtggtgtgatcacagctcactgcatttccgtgtatttcagagctcactgcagcctcaaactcctgggctcaagtggtcttcctgcctcaacctcccaggtagctggggtcacagggatggaccaccacactgggctaatttaaaaaaattgttagcaacagggtcttaccatattgcccaggctggcctcaagcgatcctcctacctcagcctcccaaagtactgggattacaggtgtgcagcaccacatctggcttaatttttttttttttttttgagacagggtctcattctgtcgcccaggctggagtgcagtggagggatctcggctcactgcaacctccgcctcctgggttcaagcaactcctgcctcagcctcccgagtagctgggattacaggtgcccgccgccatgcccggctaattgttgtattttttggtagagacaaggttttatcatgttggccaggctggtatccaacttcagacctcaagtgatccgcctgcctcagctttccaaagtgctgggattataggcatgagccactatgcccagccagagactccatctttaaaacaaaaacaaaaactcagggtgtggtacccaccaacctggcttacccagccttttaggtgagtctaatgcatgctcaaatttgaaaaccactgggttaaacgtctggtctggagttcatcaaaaagtcatggcctgaatccttacctgtaaggcatcagaatgcaaatgaaaattaacttaatgaatattttacttgagccgggcacacttcccacaacagtataggatggctgtccttgtcctgttttgtagaggacggtgctaagcagcctattcattctcacaaggtctccaggaaaccacacttttttaaggagtagaattttggggtagggccgggcgcagtggctcacgcctgtaatcccagcactttgggaggccgaggcgggtggttcgcctgaggtcaggagtcgagaccagcctggccaacatgatgaaaccccgtttctactaaaaatacaaaaaataaattagccaggcgtggtggcgggagcctataatcccagctactcgggaggctgaggcaggagaatcgcttgaatccggggcaggggcgcggaggtttcagtgagccgaaatcgcgccacttcacactccagcctgggagaaagagcgaaactccgtctcaaaaaaatatatatatatatatatttgggtaggaagcacaagtagggaccgtgcttgctgccagaacaaccaatagaaactccttgaaggccttcctggcacaaacgtagtctccagcaccctctgccgaccaggccccgcgccctcagtgctgagacagcctccagccctcggtgccttaggggttgcgcgtcaccttggagaccgcgtgagaggagggcgtgcctctgcaaaggcggaagtcggctgtggaagtgtgggcggccattttgagaccgggcaagaggggcgggactggtgcggccgagtgacagttgaccggttttaaccaagtgactggtaccacggggccggggaaaaagctgtgccatccaggggcggggggatgccggggacggggaggaactaggaaggggaggggaaggggaaggcgagaaggggagaggcaggggaaagaggggaagagtcgtgggagctgggagaggagggaaagaggggaagagtcgtgggagctggcagaggagggaaagggggagccgaacgtgaagggcgaagggcggggcggggcaggagagtcggggtatagagcaggcaggtgttaatggcatgggaaggaagagtaagaagtggggcaagaaggtgtcgcggtacgaggggaaggtgagactcaagaaggtgccggctaagaagctggtgccggcgtggaaggagaaggtgtggggcgaggaaacaacgaagggcgaggaaagatcccgaggcgaagagacagttttcatcgagaaggggcagggcgaggaggaggggcgttaccagagggcgggacggggcgacgggcccgcgcgggaagaaccaatcgccgagaacccggggaaggaacgggtccataaagaccaagtggaggagtaggggcgcggtcaggagcggaagcagagtgaggagcaagccccgggcgagaaacgggggcccggccgggagcaagagcaggggcggggccgggagcaagagcaggggcggggcccggagacgggcgagaccaggtacagtacccagcccctgggcagaccccgagcgaggagaaagcggcgataccaagagaagtgcgagggtggggcaagaggttggggcacagccgggtggaagtacacgggtgcgatcgcaggcagaagcagtacgggggaacttaagagggggactgtcaaagcgagaaatagaaaccaagaccaggtgaagagcaagagtggaatacagggagggggcggaataaggagcaaggtgaggataaagttaaaggaagagacgtggaggcggcggggcggaacgaggcggaggagcaggggtgtggccagaaacattagtagggctggggcccggagcaatagcagaggtgcgatacccacgagggtcgggggcagggccaggagcaagagcaggggcgggaccaggagcaagtgcagaggcggagccaggaacaagagcagaggcggggctaaaagtccgtgcgggggcagggccaggagcaagagcaggggcgggaccaagagcaagtgcaggggcggggccaggagcaagagccggggcgtggccaggagcaagtgctgtgagaggcgcagaagcgaggtggaatcttaaaagtgggctccagagagctgtccggcgcgtgggtgttgactcctgcgttctccaggttctagccacgttatgtgcggcccagccatgttccctgccggtcctccgtggcccagagtccgagtcgtgcaggtgctgtgggccctgctggcagtgctcctggcgtcgtggaggctgtgggcgatcaaggatttccaggaatgcacctggcaggttgtcctgaacgagtttaagagggtaggcgagagtggtgtgagcgacagcttctttgagcaagagcccgtggacacagtgagcagcttgtttcacatgctggtggactcacccatcgacccgagcgaggtgaggggaccagggtcaagtgaaccagagggattttgaacccgcactccactcatttctggacgtgtggcctaacctctctttgcagaaatacctgggcttcccttactacctgaagatcaactactcctgcgaggaaaaggtgagtgggtgcagcacggataggctcattctatgagccttggttttcccacctctaacatttttatttatttatttattttatttttttgagacggagtcttgcgctgttgcccagactggagtgcagtggcgcgatctcggctcactgcaacctccgcctcccgtgttcaagcgatgctcctgcctcggcctcccaagtagctggaactacaggcatgtgacaccacgcccggctaatttttgtatttggtagagacagggtttcaccacgttgcccaggctggtctcaaactcctgacctcatgtgatccacctgcctcagactcccaaagtgctgggattacaggtgtgagccaccgtgcctggcccccatctcaatatgtggtagcaccatccaaccctggtggctttaaggattcaagaaggctgtctgtgtacagttcccagtaacccaccaagcacctagtaggtgctcaagtaagcttttttgttccatgttttttttgttttgttttgtttttgagacggagtctcgctccgcccaggctggattgcagtggcgcgatctcggctcactgcaagctccgcctcctgggttcacaccattctcctgcctcagcctcccaagtagctgggactacaggcgcctgccaccacgcccggctaattttttgtatttttagtagagatggggtttcaccgggttagccaggatggtctcgatctcctgacctcgtgatccgcccgcctcggcctcctagagtgctgggattacaggcgtgagccacctcacccggccttgttccaggtttttaaagctatgagtaggagtttaccatatatataattcacacaccataaaattcaccattgttatttttgttatttttctgaggcagggtctcactctgttacccaggctggagtgcaatggtgaaatcacagctcattgcagccttgacctcctgggctcaagtgaaccttctgcatcagcctcttgaatagctgggactagttgtgcgccaccacaccagcacgggaggatcacttgcatccagaagctcaagactagcctaggtgaatttggctgggcatggtggctcccacctgtagaaatgctaaggcaggatcatcataatgagcctaggaggttgaggctgcagggaactgtgatcatgccactacactccagcctgggtgacagagtgagaccctgtctttgtttttattaattaattaattaatttttgagatggagtctcactctgttgttggggtgatcagacccaacaccaggtcggggggagggggtggcgacgaagtccggcggagtcaaaggattgagaaaaaggcagtttgagagagagaagtaaagtgggaccagagggccattgctagtgtatggaggctgctaaagccccgagctctgggagcccacgctatttattggtaatccaacaaagaaacaggtggtgagaatgtggaggtcaaaagggcacattgcattaagcacatgatttacagctgtgatggtttagcatttgctctgctgcttgagataatggagagcaggttcttttaactcaagatacaatcaatcctgggagcgcaaggagcaagcaagtctagacacattccagagccatgagccctggattctatcgaggccatgagggattttatgcccttggcttagattatggtgcatgatggtaggcttccaccctttagcacagagcttggtgttccaaaggccacaaggggttttagaccctggaccccggacatgttccaagactcttttacattatgtcagacatgcaagccctgcctcagcttctcctaacactctgtcgcccaggctggagtgcagtggcgcaatctcggcacactgcagtctctgcctcctgggttctaagcgattctcctgcctcagcctcctgagtagcaggaattaaagtttttaattttggtgaagcccagtttataaatttttttcttttttttgcttgtgttttttgtgtcatttacaaaggccttgcgtaactaaagatcatgaagacttactcatattttcttcaagagatttttagttttagctcttacatttaggtctttcatccattttgagttaatttttgtatatggtgtgaggtccaagcttttacacgtgcatatccagttgtcccaatgccgtttggtgagattcttcttttttttttttgagacaaaatctcattctgccacccaggctggagtgcagtggcgtgatcttggctcactgcaacctccccctcccaggttcaagcgattctcctgcctcagcctactgagtagcaggaattacaggcatgcgccaccatgcctggctaatttttatattttagtagagacagggtttcaccatgttggccaggctggtctcgaactcctgacctcaggtgatccacctgccttggcctcccaaagtgctgggactacaggcgtgagccaccatgcctggcctgttgagattattctttccccgctgaattgtcttggcacctttgtcaaaaatcaattgaatataaatataagggtttctttctggactcaattctattctaaatgaattgatttctcaataattcattgctctaaatgcctattcatatgccagtatcacagagtctttttttttttctttttttgagacagggtctcactctgtcacccaggctggagtacagtggcatgatctcggctcagtacagcctacacattctgggttcaagcgattctcctgcctcagctgcccaagtagctgggactacagatgtgcgccaccacgcccggctaattttgtatttttggtagagatggggtttctccatattggtcaggctggtcttgaactcctgacctcaggtgatccacctgcctcggcctcccaaagtgctgggattatagatgtgagccaccgcgcccggccaataattttatttttttagagacagggtcttgcgctgtcacccaggctgaaatgcagtggcttgatcatagctcattgcagcctcgacctcctgggctgaagtgatcctcctgcctcagcctcccaagtagcagggactacaggctcaagccatcacaccagtgtactttcaattagacagggtctcactatgttgcctaaggctggcatgaaagaatttctgagagtagtattaataaatgcaaataataaaatgaggtaatacgttagaaaggaggggggggcactgttttagtgggggtcgttggagaaggtcactctggaaaggcttgagcagagactcaaatgataaaaagtggggattattaggagagccaggtaaagctttccaggccgagggaagagccagcacgatggcccagaggtaggaaagaggtcagcatgtgtgagaaactatgaagaggactttgtggctggagcagagtgagtgagagggagtgtgggaggagaggtcagggaagtgatgggggaaggtttttggggcttgatgggccatggtgaggacttggcttttactctgagacagagcctgagagggccctatgcagaggagggattggatctgattccaggcttcactggctccctcctgttgttgggggagcagggcaggagcagtgagacaaggaggaggctgctacattgcccaggcaggagatgacggggacaggaccagggtgttagtggctactgtcatcctcacaggaaggaggtccctgccccactagcaccttctcctctgcaatgggaactcaggcagggccagggacaggtgtagttgacaggattgaaaagagcctggtgctgggtgtggtggctcatacctataatcccagcactttgggaggccagggagagaagattgcttgagcccaagaattcaagaccagcctggacaacatagggagaccctgtctctacaaaaaaaatcaaaaaattgggccgggcatagtggctcatgcctgtaatcccagcactttgggaggccagggcaggtggatcacctgagttcaggagttcgagactagcctgaccaacatggtgaaaccccatctctactaaaaatgcaaaaattagccgggcgtggtggcgcatgcctgtaatcccagctacttgggaggctgaggcaggacgatcgcctgaacctaggaggcagagggtgcaatgagctgagatggcgcccttatactccagcctgggcaacaagtgcaaaactccgtctcggaaaaaaaataaaaaataaaaaaattagccaggcgtggtagtggtacctgtagtcccagctatttgggaggctgaggtaagaggattgctgaagtctgggagaggtggaggttacagtgagctgtgatggcaccactgcactccggactgggcaacagagcaagaccttatcttaaaaaaaaaaaaaaaaagccaggtgcagtggcttacacctgtaatcctagcattttaggaggctaaggctggaggattgcttgaggccaagagttcaagaccaacctggccaacatagcaagaccctgtcccatgtaaaaaataaataaataaataaataaataaataaattacagaaatagccagcctgggcaacagagtagactctgtctctacaaaaattaaacagttttcaaagaaagaatggcctggtggctcatgcctgtaatcccagcactttgggaggccgaagcgcgcagatcagttgaggtcaggagtttgagaccaggctggccaacgtggtgaaacctcatctttactaaaaatacaaaaattagctgggcatggtggtgcacgtgtgtagtcccagctactcaggaggctgaggcaggagaatcacttgaacccaggagacagaggctgcagtgagtcgagatcatgccactgcactgtagcctgggcgacagagtgagactccttcttgaaaaaaaaaaaaaaaaggaaaagaaaggagcctggcaaagaaagtaaagaaagtcagccctctcgatgaagggctgtgcacaggtgctgaatctggtaaatccctcgccctggtcccacagcaaccaaggcctccccttggtggcctgagtgccgccttctctcggggacgcctcttagccttcactggtgctgttctgcatgcctgaaacatccttctcctcttctcccatctccactctaagcgctccccacccttttctattcagccaggatcccgcatccctgggaggttgtccaggcatgccctgtcaccctcgtcctcagtcccttcctgtgtaatcgccccatcctacactcaccccaagctcaaggcccagaacttggctgtcctctgacttgcataggtggcagaaagtctgctgcagagagggtggaagcccacctcaagagtgagactgggggccagatgagatggctcacgcctttaatgccagcactttgggaggccaaggtgggaggctcacttgagaccaggagttcaagaccagcctgggcaatctaattttttttttttaagcctggaactgggaatccctggagtggaaagcagcaccctgggtgccacatccctcccaccttcccagcatccctcccacctgcacagttttgttcatcccatgctgcccttccctatgtattccctacatgcacattctgtctgcagacactggctctggagtcatctcctccaggaaggcctccgactccctccacagccccttacccctctgccccctcctaggctgttccatcccccatccaagccccaaacctagaccatgtcctctgaccatcacatggtggacagtgtgctgcccccggacagcccaggagacagactgttagaggcgggcttaaggcagggggcacccagaggctaccataaggacacacttgtggggccatctcaccctcagccctctgaggacctggtgcgcatgggccacctgacggggctaaagcccctggtgctggtcaccttccagtccccagtcaacttctaccgctggaagatagagcagctgcagatccagatggaggctgcccccttccgcagcaaaggtgggcctgggggaggcgggagggatcgcaacctggcaggggtgtggggtttgctgggggcctctgtggggccatgatctgaggagggtatgtggggggcgggagctcagcacattccatggcctagaggggccacacagaggccccagtgggacccatggcgtggaggcaggtatggggagttgtggggagatcccagggtggtctggggcctggaaccggccattgggaggccccagcagtttcagtgcccagggcctccctgcagagccatgcatggcagaagaagtgtgtagcatgagctggtacacgcccatgcccatcaagaaaggcagtgtggtcatgcgtgtggacatcagcagcaatggcctggggaccttcattccagataaaaggtaccctttcccaagacgggggctggggtggactccgggggaattcctcaccccagggtccccagaggagccagtgggagatccaagggagagaatggggagaggagaggcagctacgagctgtggaacccctgacactgggacctcacctgcgcctattctgcacctgctgctaggttccagatgaatatcaacggcttcctgaagagagaccgggacaataacatccaattcactgtgggagaggaggtgagggaatatggcaggggaaaaagacaatggtctgggccttaggctgacgccctggttacttcccagacaagcagcagatcccatttagggagcaccaacttcatgccaggccccacatgaagatcccattaatctccccagtgacctgtcgaggggacgtactctcacatactccattataaagaggagaaaactgaggtcccaaagggatggaaccattttcccatagtccctcagcatggagggagtcttgaagttatctgtctgactcctatacacacctgtacatccatacctgtacatacatatatagtacatacctgtacatacatatatagtacatacctgtacatacatatatagtacatacctgtacatacatatatagtacatacctgtacatacatatatagtacatacctgtacatacatatatagtacatacctgtacatacatatatatgtatatacctgtacatgaacagacacacacacacacacacacacacacatatatatatatatatatatttttttttttttttttttttttgagacggggcctcgctctgtcatccaggctggagtgcagtggtgcaatcatggctcactgcagacttgacttcctgggctcaagcaatactcccacctcagcctcccaagtagctgggaccacgggcatgtaccaccatatccagctaatttttaaattaattatcattattattattattatttttgagacagagtcttgctgtgtcgcccaggctagagtgcagtggtacgatcttgcctcattgtaacctccacctcccaggttcaagcaattctcctgcctcagcctcccaagtagctgggattacaggcacccatcaccacgccctgctaataatttttttattttttgtagaggcaaggcctcactctgccacccaggctggagtgcaggggaacgacctcgtcaggctcaggtgatactctcacctcagtttttgtatttttagtagaggcagggttttaccatgttgccagggtggtctcaaactccggggctcaagtgatccgcctacctcggtctcccaaagtgctaggattacaggcgtgagccactgtgcccggcccatgcccatattcaattttttttttttttgagacagagtttcgctcttgttgcccaggctggagtgcagtggtgcgatctcggctcaccgcaacctctgcctcccgggtacaagcaattctcctacctcagcctcctgagtagctgggattataggcacgtgccaccacacccagctaatttttttttttttttgtatttttattagagatggggtttctccatgttggcaggctggtcttgaactcccaaccaggtgatccacctgcctcagcctcccaaagtgctgggattacaggcatgagccaccacgcctggcctcatacccatattcttaatcccgatgcattcacccattcattgatgcagtcactcagcaggcacttactgagcacacgttgttgcatcatggggacacagcagtgaacacacagacccaaatctctgccctcctggagctgacactctagtgggggagacagatggcaaaccggcaaactggtaatgtgaaaatcaagtgaattctgtagtagggtaaagggcggtaagcgctctggagagaaatggaacagggcaacgggagttgggtctgtgcagaagaagagtgcaatatttaatgggatggtcaagaaaggcctcattgaggaggttaagcttccaaggagagaattgcatggatactaagggaagagcagttcatcaggagaaacagcatttcatcaggagaaacagaggccctgaggtgggcatgttcctgggaggtctgagaagcagagaagaggccttgtggctgggagagagggaccgagggggagaatggtaaggaatgaggtcaaggaagtgagaaggacaaatcgcgtggggccttgtgggtccaggtcaggccttggacctaaatgagatggagtctcaggagagtggggagagtgttggcgtccctcctgtccctccttggcagctcttcaacctgatgccccagtactttgtgggtgtctcatcgaggcccttgtggcacactgtggaccagtcacctgtgcttatcctgggaggcattcccaatgagaagtacgtcctgatgactgacaccagcttcaaggacttctctctcgtggaggtgaacggtgtggggcagatggtgggcggggcgtcttggagggagctgggcctcagcccctgaaataaggtaggggcctggggctctagaagtccccaaagacatatctgtccccatgagaggcagatagcatgaagaaaaaacacaagattctacagccagagggcctaggttcaaaccctggttctgccacctcctggctgcctgaccctggacctggcagttcaacgacccggtcttcagattcccatttgtaacatgggagtaatatttatatttacttcataggattgttgtgaggatgatataagttaatagtttctggccgggtgcagaggctcatgcctataatcccagcactttgggaggctgaggtaggagaatcgcttgagagcaggagtttgagaccagcctggacaacatagtgagaccccatctctaccaaaaatacaaaacttagccaggggtggtggcatgagtctgtagtctcagctgctcagaaggctgaagcaggaggattgcttgagcctgggactttgaggctgcagtgagctatgatcacaccactgcacttcagcctgggagacagatcgagaccctgtctcaaaaacaaacaaacaaaaaaaactgggcgtggtagtgggcgcctgtaatcccagctactcaggaggctgaggcaggagaatggcatgaagccgggaggcggagcttgcagcgagccaagattgtgccactgcactccagcctgggcgacagagccagactccgtctcaaagaaaaacaaaaaaaaaaagttaatagcttccataaccaatggtatatatgtgccattacattctacactctggaaaattctgcattgcaatatacatctctgcccaagggtttcctattaggcattgagagcctatattatcccagaatagggagggagtgtctgaagtaaggatcttttggcttcagcgacagaactatgttggaattagtgcagctacaggagaacgccaaggcaggttggtttacccagagaactggctttaagaagtgcacccacagccggtgcagtggctcacgcctataatcccagcactttgggagaccgaggcgggtggatcacctgaggtcaggagttgcagaccagcctaggcaacatggtgaaaccctgtctctactagaagtacaaaaattagccaggcatggtggcaggcacctgtaatcccagctactctggaggctgaggctggagaatcgcttgaacctgggaggcggaagttgcagtgagccaagatcgtaccactgtactccagcctgggcgatagagcaagactctgtctcaaaaaaaaaaaaaaaaagattgccttaacctcctcccatcaaggtcaaaagccctactcacaatttctgaggatcccacgtggattagtattctcctgaccccttctggctctgaattcctgcttatgtggaatttgttcagtttgtggaccatcttcctgtcctgtgtcagctttctctgttctgagccaagtctattcagacattgtttaatttacaccaacttttttttttaagagacaggcttttgctctgttgccgaggctggagtgcactggtgtgatcatagctcactgcagcctccaactcctggacttaaacgatcctcctgcctcagcctaccaaatagctggtattacaggcatgcgccaccttacctggctaattttaaaaaattgtttgtagagacacggtctcactatgttgcccagactggtcttaaactcctgcccttaagcaatcctcccatctaggcctcctaaagtgctgggatcaccgtgcctggccaatttccacaaacttcgttttttttttttgtttttttttttttgagatggaatttcactcttgttgcccaggctggagtgcaatggtgtgatctcagctcactgcaacctccaccccccgggttcaagtgattctcctgcctcagcctcccaagtagctaggattacaggcatgcaccaccacacccagctaattttgtatttttagtacagatggggtttcactatgttggccaggctggtctcgaactcctgacctcaagtgatccacccgcctcagcctcccaaagtgctggtattacaggtgtgagccatcgcacctggtcatagagaaggtgtttatattcacaggaatgaaaacaagttcaatgtgaattcaggcatccaaattcttgttccttattttttttaacttgttgaagtgaaatccataaatttaaccattttaaagtgaacatcagtggcatctagttcattcacaatattatgcaaccaccaccactatctacttccaaaaaatttccatcactccaaaataaaccctgggtttgtttttatttcatgtcagacaggtaatgggccgacaccataacaaggcttgagggagacacatctcagatgacggtgaaaacccaatcgccacacgtagaaactacaagaagatcctatgatcctgttttagttctttttcttttttttctttttgtcatggtctcactttcttacccaggctggagttcagtgatgcaatcttggctcactgcagcctccatctcctgggttcaagccatcctcctacctgagcctccctagtagctgggactacaggcgcatatcaccatgcctggctaatttttgtatttttggtaaagatggggttttgccatgttgcccagcttggtcttgaactcctgacctcaagccatcctcctgcgttggcctcccaaagtgctgtgattacaggcatgagccaccgtgcccagccttgttcttgttctctaaccaaggagatttctccctgatggcctcatctgtttgtctcctctcttccctgctcctgtctctctccaccactcccttccacactgcccccaggaaacgaatcctcccctggctcatggttggggtccaggtatagatgctgtaacaaagagaccctggaagggaattacttaaacagagactgttgctcattgtttttttttgtttgtttgtttgtttgtttgtttgttttttgagacagagtctcgctctgttgcccaggctggagtgcagtggcataatcttggcttactgcaacctctgcctcccaggttcaagtgattcttctgcctcagcctcccgaggagctgggattacagccacccaccaccacacctggctgatttttgtatttttagtagagatggggttttgccatgttggccaggctggtcccgaactcctgacctcaaatgatctgcccgccttggcctcccaaagtgttgggattacaggtgtgagccaccgcacccggccgttgctcattctcgtaacagtctggagatgaggaaccttgttccttccattttctctcttcaccatcccctgggctcaaggtgttggcctctgtatgatggcagccactgggaaaggggaggagcagaagtagagggcaagccattttcttttaagcaaacttcacttccactgacattccactagtgagaaggggtcacctggctacatccaactgcaagggacactgggtggtacatgcccagctaaactcaatcaccaaaaaatatggggaaatggatttgagagctttactagccatctcctaaaagtggagaagaaaatttattggttcacgagaccagatttcaaacagtatcactgagacggggtttctcgcctcatctcttggaccacattcctctgttttttgtttgtttgcttgctttttgagacggagtttcgctcttgtcacccaggctggagtgcagtggtgcaatcttggctcattacaacttttgcctcctgggttcaagcgattctcttgcctcagcctcccaagtagttgggattacaggcacgtgtcaccacgtccagccaatattttgtatttttagtagagatgggatttcaccatgttagccaggctggttttgaactcctggcctcaagcaatccacctgtctaagcctccaaagtgctaggattacaggcactcggccacattcctctgtattgacttgatgctcaaaacagtcctgttggctgggtgtggtggctcaggcctgtaatcccaacattttgggaagccaaggtgagcagatcacttgagcctacgagttcgagaccagcctggccaacatggtgaaaccccgtctctactaaaaatacaaaaattagccaggcatggtggtgggcacctgtaatccgagctactcgggaggctgaggcaagataatcgctggaacccgggaggcagaggttgcagtcagccaggattgtgccactgcactccaacctgggtgacagagtgagatcctatctcaaaaaacaaacaaacaaaaaatggtcctgttttctggaactgaagactacagaggctgcatcttctcaagcccacattcagtgggaaagatctttcccaagaatcaccacatccccaaagtcacaagattccttccacttggtacagctcaggtccctaccaccccaacaaagccaacacaatcaccatgcccaacatgatgcctagtgaattaaatgagtcagaactttccaatgaggctgaggcgggaggactgcttgaagccaggagttcaagaccagggcaatgtagcaagactcccgtctacacagttatttatttattttaattagctgggaggccgggtgcggtggcttacgcctgtaatcccagcactttgggaggccgaggtgggcggatcacgaggtcaggagatcgagaccatcctggctaacatggtgaaaccctgtctctactaaaaatacaaaaaattagccaggcttggtggtaggtgcctgtagtcccagctactcgggaagctgaggcaggagaatggcgtgaacccgggaggcggagcttgcagtgagccaagatcacgccactgcactccagcctgggtgacagagcaagactccgcctcaaaaaaaaaaaaaaattagctgggaatggtggcaagcacctgtagttccagctactcgggaggctgaggcgggaggattgcttgagcacaggagttcaagaccagcctgggtaacatagcgagacctcacctctacaaaaataaaaattaaaaaattagctaggcatggtggtgagcacctctcttgccagctactcgggagactgaggtgggaggatcgttcgagcccaggagtttgaagctgcagtgagctatgatcataccactccagcctgggtgacagagccagatccagcctttaaaaaaaatgtcccttggggcgagcatggggtgttgtatccatgtaggtataacactgactgtagccaagggcacaaggaccgctaaggaccgttgagcatgctgtgcactgcccaactccagggggcacacgaagcctgaactggctcaggcctgggtcacctgcttctctggtccatatgggggaggtttggctaccaaggtgctgctgcggggtgagcagggagagcgccctggggcagctacatgtgtccctcccaagcagctgtcagagcaggagcttccccgcaaggcaggacatgggggctgaggccaaggccacctgctcaccactagcctctgctcccctgcagctgagcattgacagttgctgggtgggctccttctactgcccccattctggcttcacagccaccatctatgacactattgccaccgagagcaccctcttcattcggcagaaccagctggtctactattttacaggcacctataccacactctatgagagaaaccgcggcagtggtgagtgtgctgtggctggacccacgcctggggagggcaccctggtgaacccctccactgaaggtggctgggggctggaattgctgtgggtgaggcattggggaaggaacttgccaaggccccaaatcacccttgcccaccccgaatgggccttgccttgcccttttttttttttttttttttttttgctgggatgaggcttccacccagaccctcctgggaattgtgagcagctgtgagaagagggggtgcgagagtaaagggaggtagagagaggcagacccacgcgtgtgcccacacacagtggcagaaggacttgccaagacagaccagacggggagagaaagtcagagggagaggggcatggcaaatcagaaagacagagcgggaggagagagagaaacagatgggcaaagcctcaagggaaactcattggagaggaaaaaagagagtctaggcacagtggctcaggaggccagactattcaagaggctgacgggagggggcatcgcatgagcccaggggtttgaggctgcagtgagctatgatcacaccactgcactccagcctgggcgacagagcaagaccctgtttcaaaaaaaaaaaaaaaaaaaaaaaaagctgggcatggtggctcatgcctgtaatcctagcactttgggaggccgaggcgggtggatcacttgaggtcaggagttcaaggccagcctgaccaacctggtgaaaccccatctctgctaaaaatacaaaaattagccgggcattgtggtgggcacctgttattccagctactcaggaggctgagaaaggagaattgcttgaacccaggaagcagagcttgcagtgagctgagttcacgtcactgcactccagcctggccaacagagcgagactcagtttaaaaaaaagagagaggaaaaagcgagagagatgaaaaagagagactattcaacttaatctttaaatgataccgtggctgggtgcagtagctcacacctgtaatcccagcactttgggaggctgaggcaggtagatcacatggtcaggagttcgagaccagcctggctaacatggtgaaaccccgtctctactaaaaatacagaaaattagcaaaattagctgggcgtggtggcacatgcctgtagtcccagctactcgggaggctgaggcaggagaatcgcttgaacccgggaggcggagcttgcagtgagctgagatcgtgccactgcactccagcctgggcgacagagcgagatgccatctcaaaaaaaaaaaaaaaaaagaaaaaggccaggcgcggtggctcacgcctgtaatcccagcgctttgggagggcggatcacgaggtcaggagtttgagaccagcctggccaatatggtgaaaccccgtctctactaaaaatacaaaaattagctgggtgtggtggcatgtgcctgtactcccagcttctcaggaggctgaggcagaagaattgcttgaacccaggaggcggggctgcagtgagccaagatcgtgccactgcactccagcctgggcgacagagtaagactctgtctcaaaaaaaaaaaaaaaaaaaaaaaaaaaagataccaaagctctcttatttcttccagtttctcccgccatctcagtgagaactgtcagcttacagagtcactggaaattggactgtaacttacatttcataagtgaatgcgtgttcccagcagctttgcttagtctctttcttactttgggcattttgacagtgggaggaaccaaattcaaattggcttaatccaaagaaaagtggtgtttattggcttccgtggctgaaaagcccaggagcatgttggtttcaggaaaggctgcaccatggggtcactgtcacggttagacagtcacctccttgtgcatgccacggtgattcaggcctctacgcagcaactgtagacttttatgcccctcagtagccccagaaaagagcatcttgttgcggattgcaagctgatattgcctctgatttggccggcttggtcacatgctaatcattgtggcctagggagtgcaagggaggtgtcagcccaatctgaccctcatggacagagtgtgagcaaggaggattttctcaaaggcagcgggtgccctctgccaggtgctccctgacaccacactgaacgggtgcttcagcatgagaggacagataacaggctcactaaagccagggaaatgtgggcagggggcagaggccccagatccaaccacctgggtctgaggccccatactgacttcactaggcagttggattcgtgtcctggccagcgagtgcatcaagaagctgtgccctgtgtatttccatagcaatggctctgagtacataatggccctcaccacgggcaagcatgagggttatgtacacttcgggaccatcagaggtaagggtgtgggcctctgtcagccccagggacccctccataccctctctcacctccgagaattctaaccttgggccctcactcattaccatgtgccctgaggagggcccctaggctgagggtgatggtggtggtggagggatgcgtttgtaggggtagggcttgggggtatgttatgtatctttcatgatgtacttggttttaaagggcagaagagctgggcacagtggctcatgcctgtaatcccagcactttgggaggctgaggcaggcggatcacttgaggtcaggagttcaagaacatcctggccaacatggtgaaaccccatctctactaaaaataaaaaaattagttgggcgtggtggcaggcgcctgtaatcccagctattcaggaggctgaggcaggagagtcacttgaacccaggagatgaaggttgcagtgagccgagattgcaccactgcactccagcctgggcaacagagtgagactctgtctcaaaaacgaacaaacaaatcccccaaaaaaacaaaaatagcagaagcccaattcaaaaataattgaagtacagctgggcacagtggctcatgcctgtaatcccagcactttgggaggctgaggtgggtggatcacctgaggtcaggagttcgagaccagcctggccaacatggcgaaaccccatctctactaaaagtacaaaaatcagctgagcatggtggcatgcacctgtagtcccagctacttgggaggctgaggcatgagaattgctcgaacctgggaagcggaggttgcagtaagccaagatcatgccactgcactccagcctgggcaacagagtgagactgtcttaataataatgatagtaataataataataacttaagcacaaagaatttgtggacttacataaatgaaaagactacggttcaacttcaggtatggctggatccaggggcccacagggtaggtcatcaggactccatctcttggtaaggtagtgcagcatagtaattaattatagcacagattctggagagagactgctccatcacaccttcgctgtgtgcctctcgatatgtaacttgacctctctgatctcgttttcttcacctacaaaatgtggctaatggtagtactagcatctaggtcaccgggttgatataaagattaaataagttggtttttgtaaaggtcttagtgctagtgatgtggtgagtgttacaaacagtttattattattggtcctataatttgggtccatttttaggtagctattcctccatggaggttaaaggtggccccttaaagcttcagactcaagtcacctactagtctgagtcacgccaagagaatgaagacagcatctttcccattaattctaacacaaatcccagagtaaactctgatcggcccaccgtgggtcacatggccagacctgaggcatgagacccacagtctcatgactgtgaccaaagacagacatgctctgataggccaggtgtgagtgacgaaaggccagagaatgagatcccaaggacggaggggctggtgggcataaggagggcaatcggagttggcttgatgggctgccagacaggagggagagggcctgaacatgaacccgaccttgctctgcagatggccaggtgtcctttgagatgctgcccaggcagtggtctgtgtgcgagcagataggaggtactcattaccccgatgggtctgcggtgggaggctgggggaactgaggatgcagaagagcaggggagggtggcaggggtcatgggaaagaatgggcagtgtcttagggaggggtgagttatggggaggggtacagctggcacaggaccaaggctattgagccctggggcggctctggactgcccctttccctctcagttaccacctgctccataatttggtctgaatacatcgcgggtgagtatactctactgctgctggtggagagtggatatggtaatgcaagtaaacgtttccaggtggtcagctacaacacaggtaatgagggtgatgcaaggggctgggcacaaaggggcaggatcccagactgtggactgcatgcccatcctgagggatctgtgcccagcagacagagggagggcaacattacctgtgtcactcctggttgaggagtagcagtggagaacaggatataggcttggtgatctgaaagggccctgtggctcacaataaagagattttattttacctgcagtgagaatagggcccctatgtagatttgtgcaggctgtgcagtgcacaaaacccccaaccgaggggtcagaggagacaggtcctgtgccttaacaggactgtttcctctcaggcagtgcctttttataattcacatgaagaaattctaaagggctaggcaaggggctcacacctgtaatcccagcactttgggaggccaaggccagaggatcccttgaggccaggagttcaagaccagcctggggcaacatggcaagaggctgtctctacaaattaaaaaaaaaaaaaaaaaaaaagtagctgagtatggagtcgcacctgtagtcccagctacttggaatatacctgaggtgggaggatagcataagcccaggaggttgaggctacagtgagctatgatcatgctactacctgggtgacagagcaagacccggtctcaaaaaaaaaaaaagagcagagccaggcgtggtggctcgtgcttataatcctggcactttgggacaccaaggtgggtggaatgcttgagctcaggcgttcaagaccagcctaggcaatatagcgaaacctcatctctactaaaaatacaaaaattggccgggcacggcggctcacgcctgtaatcccagcactctgggaggccgaggcggggggatcacctaaggtcaggagttcaagaccagcctgactaacatggtgaaaccctgtctctactaaaaatacaaaaattagtcgggcatgatggtgggtacctataaacccagcaactcaggaggctgaggtggaagaatcacttgaacctgggaggcagaggttgcagtgagctgagatcatgccattgcactgcagcctgggcaacagagcgagactccatctcgaaaaaaaaaaaaattagctgggcatggtggtggtgtgcgcctataatcccagctactccataggctgaggtgggaggatcacttgaaccgaggaggcagaagttgcagtgagctgagatcacaccactgcactccagcctgggcgacagggagatcctgtctcaggggggaaataaaagaaaagaaactctaaggactagcaaacccgagtgggaagctctttggagggttttacaggaggctgagaagcaaacaacttgctccagctccaggttttgaaagtgcagggcctcaggagattttgctgtgttctccccacctgtagctagtgatgacctggaacttctctaccacatcccagaattcatccctgaaggtaggaagggaaggcagacgtggcctcagggtggctgtgggccaggaggggcccaggtgactccacttcactgctgtgtcctctcttcctctgctccggtcagctcgaggattggagttcctgatgatcctagggacagagtcctacaccagcactgcaatggcccccaagggcatcttctgtaacccgtacaacaatctgatcttcatctggggcaacttcctcctgcagaggtgggcctctaccacccctgggtgggccaggcatactctgtctccccagcaactttacggtggggaccctttcaagcccaggctaggcaagtctcaccaagccttcaaaggatgcacaaatccagaagttaccaggactgtgatgaggaacacaccgttagggtagtcagtgctgggatgggggaagccaatgttttaaagctgtgggagcccttttcttaaaatgaaaccttatataaagacccagcctgtgtgagcaatagatgagcagtttctagggtttttttttgtttttgtttttgttttgggacagagtctcactctgtcacccaggctacaggacagtggcaaaatctcggctcactgcagcccccgcctcccagattcaagcgattctcctgcatcagactcccgagtagctgggattacagctgcatgccaccatgcctggctaatttttgtatttttagtagagacgcggtttcaccatgttgggcaggctggtctcaaactcttgacctcaggtgatcctcctgcctcagcctccgagagtgctgggattacaggtgtgaaccaccatgcccggctaattgacaaacattttctagggacagtttaggatcctccccaccccagccaccctctcgaccctcaggaacctaggggcccctgagccaccttcttgggtggctggcaaactgccaggttggcccaatgctcctgttttacagatggggagctgaagattctcaaagggtttggggtggggggcgggagctaggatttcaagcttcctttgcatgttcttacaagtggagaaacagtaagtggctcccgtgttattaggcctgggattgggggaagcggctgtccagcatgcgcctagctctccatctctgtccctgcagctctaacaaggaaaacttcatctacctggcagacttccccaaggaactgtccatcaaatacatggccagatcgttccgtggggctgtggctattgtcacagagacggaggaggtgggctgccccgcccctctccccgttccctctctgcccacccccaaaccccaggggcccctctttcccccgtcacagtaaaggagccaagggaagggggcaccctcggggaccctgagaaagggcagtgaagctccatttataactgaaactcctggaactcagggtaagtgtcagctccaaagtcacgcagaccggagctatgatccgatgttcagaggcggccctctttcatcccacagtgtggtcgttcacttcataaatattgagcatttactgtgtgcctgcccccgtgctggagaacacagagtgatcagggctgcaatggggaaaatattacctatggaagcagggggacctggccccgtctgggggcttgtgcatgtcagggagggcttcatgggggagaccacatggagggggacatcttggaggctggaggggatcccccaggttgtggctcaggaaggggagtgaaggttcccttcagatgtgtatgggggtgggcatcagtgcagagatgggaaactgaggccagggaaatggtgagaccctggaagctgcaaagagtgagaagaaaagaggtctcggctctaggaaccgtggctgttagggagtgtgtgtgttagagatgcttaggtcgcaagtgccagaaacccaaacagaccgaaaacattgaaaaaagtgatcatagtgtgtgagggctggaaccagaggtgattgggctcagggaagtagagccgtggcaccacagagaaaaggaaggggagcgcccttggtcccagtggaggtgagtttccaaacttcatccctcaaacaatggggccaccacactgggcagagggtgaggtgggatcagaggaccccatggtcctgacacacacacatccggctgtcatacccgcagatctggtacctcctggagggcagctaccgggtctaccagctgttcccttccaagggctggcaggtgcacatcagcttaaagctgatgcaacagtcctctctctacgcatccaatgagaccatgctgaccctcttctacgaagacagcaaactgtaccaggtgcccggtggagctatgcggggacatcggggcaccccaggagggctgaccccagctcacctggccctgccttccccctgcagctggtgtaccttatgaacaaccagaagggccagctggtcaagaggctcgtgcccgtggagcagcttctgatgtatcaacagcacaccagccactatgacttggagcggaaagggtgagaagacaccggaccatgacaggggtctgagggctcccggcactgccctcctgaagctaccattcttgagagaggggagaccgagctaaccccagtgaaaacctcagggctatgatggcaggagttcagcacttatggaagctcagaggaggagcccaacctagtggggggaaggtgcatcagggagggcttcaaggaggaggaggtgtatgcactgtggcaagaagggtgaggaaggattagccaagtgataaggtggggaagggtgttccagaaagggggaaccacctgtgcagaggccctgatgggagggggacaaagtgagcctggtggtcatggggagaaacttgggcttcatcttgagggtcttgggagagccatggatgggactaagggaaaggactgcaggatcggattttaccgcgtgccgtaatgatgcctccggtcatcgtcctgcggagggtggatcagagcaacccagggaggcagctggagtcgggacagggaaggggcgctggggtggaaggaggaagcaggagatggaataaagataagaggtcaagtggacaggcagatggcgactgcccgttgagtagggaggactctggtctcagggatcaagggagggacgtccgaggggatgtgtgcagaggcctctgggcagcaggggctgacgctgaggaggaagattcgggctggattcgatacgggaagtgggtggggtgggaaagaggcctgcggaagcttccagtgcgcggggtgccttagagccagcagcctttcccccttgccactgcccaggggctacttgatgctctccttcatcgacttctgccccttctcggtgatgcgcctgcggagcctgcccagtccgcagagatacacgcgccaggagcgctaccgggcgcggccgccgcgcgtcctggagcgctcgggcttccacaacgagaactcgctcgccatctaccagggcctggtctactacctgctgtggctgcactccgtgtacgacaaggtgggcgtccggcggcgggcgggcaggcctgagacgggactggggcagccgggagctggcttagagggcgaggcctgtggagcggagcgcagcgggattggagaacaggactggtggtgggtgggcgggggacctgggggcggggcctggcttgagcaggacttccaggggaaggcgttgggggtgtggccgggttgaaagcagggtttggggatgggctggggtgtgtatcttctgctctgggttgggggctggctttgaggctaggaggtggtctggggatgccgcttgcctggaggctctcgccccgctgcccaatcccttcacggtgccgggcgatccctgcagccgtacgcggacccggtgcacgaccccacctggcgctggtgggcgaacaacaaacaagaccaggtaggcggagcggattgggagccgggaaaggggcggcgcccggacacccctcaccgtgccccacccccggcgctgactctgccccgcgcatccggtaccccaggattactacttcttcttggcgagcaattggcgaagcgcgggcggcgtgtccatagaaatggacagctacgaaaagatctacaacctcgagtccgcgtacgagctgccggagcgcattttcctggacaagggcactgagtacagcttcgccatcttcctgtcggcgcagggccactcgttccggacgcagtcagaactcggtctgcgcgggaccagagtggagcccgaagggcggggcgagggctaccagaatctgggagcctggggggcggggacaccatcggaggggcggggcctgtctgtgagggaggccttaaccccgtttactgcccggagcaggcaccgccttccagctgcatagccaggtggacgtgggcgtggtgctggccgaccccggctgcatcgaggcctcggtgaagcaggaggtcctgattaatcgcaactcggtgctattttcggtgaggccccccggggagttgggatcaagggaggttttgttttttttttttttttttttttttggagacagggtcttgctctgtcgctcaggctggagtgccagtggagcgatcactgcattcttggcctcctgggctcaagcgatcctcctccctcaacctcctgagtagctgggactgcaggcacgcaccacagtgcccagtgaactttttgtttttcttttgagacggagtcttgctcagtcgcccaggctggagtgcaatggcacgatctcggctcactgtaacctctgcctcccagattcaaccgagtctcctgcctcagcctccctagtagctgagattacaggtgcatgccactacacccagctaattttttgtattattagtagcgatggggttttaccatgttggccaggctagtcttgaactcctgacctcaaataatctgcccactttggcctcccaaagtgctgggattacaagcgtgagccactgcacccagccttaactttttattttttgtagagacgggggtctccctatgttgcccaggctggcctcgaattcctggactcaagagatcctcatgcctcggcgtgaggtgtgaggtgtgaggcatgaaccaccctgtgcttggccccgttagcctattccttttttttttttttttttttattgatcattcttgggtgtttctaggacaatagtggagggaaggtcagcagataaacaagtgaacaaaggtctctggttttcctaggcagaggaccctggggccttccgcagtgtttgtgtccctgggtacttgagattagggagtggtgatgactcttaacgagcatgctgccttcaagcatctgtttaacaaagcacatcttgcaccgcccttaatccatttaaccctgagtggacacagcacatgtttcagagagcacagggttgggggtaaggtcacagatcaacaggatcccaaggcagaagaatttttcccagtacaaaacaaaatgaaaagtctcccatgtctacttctttctacacagacacggcaaccatccgatttctcaatcttttccccacccttccccgctttccactccacaaaaccgccattgtcatcatggcccgttctcaatgagctgttgggcatacctcccagacggggtggtggccgggcagaggggctccccacttcccagcaggggcggccgggcagaggtgcccctcacctcccggacggggcagctggccgggcggggggctgacccccccacctccctcccggacggggcggctggcctggcgggggctgacccccacctccctccaggacggggtggctgccgggcggagacgctcctcacttcccagacagggtggctgccgggcggaggggctcctcatttctcagacggggcggttgccaggcggagggtctcctcacttctcagacagggcggctgggcagagacgctcctcacctcccagatggggtcgcgaccggacagaggcgctcctcacatcccagacggggcagcggggcagaggcactccccacatctcagacgatgggcggccgggcagagacgctcctcactttccagagtgggcagccaggcagaggggctcctcacgtcccagacgatgggcagccaggcagagacactcctcacttcccagacggggtggcggccgggcagaggctgcactcttggcactttgggaggccaaggcaggcggctgggaggcggaggttgtagcaagccgagatcacgccactgcactccagcctggacaccattgagcactgagtgaaccagactccgtctgcaatcccggcacctcgggaggccgaggctggcggatcactcgcggttaggagctggagaccagcccggccaacaccccgttagcctattcctgagtagaaaatggcagccttccgttttcctaccagccaccacctcgccccagctatgggttatttgaactgtttgttggactttggggagacctgttcaccccttcatttctgcctctcccctccttcaaccccagattacgctcaaggataaaaagctttgctatgaccaaggcattagtggacatcaccttatggagacttccatgacggtcaatgtgaggtccaagcctggaggggagggtgcaggatggtgggaaagcctgggccggcggggatcaccatcttcacctgctcctacccacaggtggtgggttcatccgggctctgcttccaggaaacacacctggggccccatatgcaagtattggagcttgggatactgggccctgggaggggaaggttggggtcgggtctcaacagggctaatccccctgagaatcccactaatgcattcataatttcctttcttctcattctttctcaacattcatccacccacccactaccacccactaactcctttcattcttttttctttaagacggagtttcactcttgttgcccaggctggagtgcggcggcgcggtcttggctcactttgcctccttggctcaagtgattctcctgcctcagcctcccaagtagctgggattataggcgcccgccaccacggctggctaattttttgtatttttagtggagacagagtttttccatgttggccaggatggtcacaaactcctaaactcaaatgatccacccgcctcagcctcccaaagtgctgggattccaggtgtgagccaccatgcccggcctaactcctttcattcattcacgttttcagaaagggccaccttcccagttgtgcaggttgcacacaaactggtatgttccctctgataacttttcttcagagggagaatagagtgagcaacagggccgttttttttttgttttttgttttttttttaacgatgtctcactcttgtcccccaggctggagtgcaatggtgcaatctcggctcactgcaacctccacctcccgggttcaagcgattctcctgcctcagcctcccaagtagctgggattacagttgcataccaccatgcctagctaattttttatattttaaatagagacggagtttcaccatgttggccaggctggtcttgaactcctaacctcaggtgatctgccggccttggcctcccaaagtgctgggattacaggtgtgagccaccgtgcccgacctagggccactttttgcaattggcacaaaggtggcataagggctggcctggccctgctttcacatctctctcttcttctgcccactcacacattcctcattcagttctttgggtgcttggtgcttcacttgcttatacacgtgatatcgcctttgcccggggcagacactgaggctcagagaggtgcagagtaacccagggagctaataagtggtagaggaggggcgtgccccagagttcttgttctcacccatttccctacccactccctggcatgcagatcctggtgttcctccctcctggcttagaatgaccttgggcagtcaaaaggggttgtaacagcccccacctccttagagtacatgagatttcatgtgctagactgaataaacaaggaggaagtgtgattgcatcagggtgggcaagggggaacgtggtgggatgagctcggagcagtgatggggcagagtaagcggagcccttatgggccatggtatgtgagctggctcctcgggagggctctaagcagaggagggactcgggtgtccccagggcccatctggctgcatggggtggggggacatcaatgaggggactggaagcagggagactctggaagagacaaggttggacaaaacagggtgggggcaaaggagttggaggtttaggggagagaacaggcaggctctcggtctttttttttttttttttgagacagagtcctgctctgtcacccaggctggagtgcagtggtgcagtcttggcctctacctccctggttcaagcgattctccagcctctgcctcccgagtagctgggattacaggcatgcaccaccacacacccagctaattttttgtatttttagtagagacagggttttactgtgctggccaggctagtctcgaactcctggactcaagtgatcagcccgcctcggcctcccgaagttctgggattacaggcatgagccactgcaccaggccgtgttaatgatattaatgaccatattgcccttgggggtgagggagagccaggcagctggtggtggtgtttgtgggagggggactgtccttcctgccccttacccctccaggggcctgaggagaccctggccacccctgtgagccttttttcctcccaccgagggcaacctgatggtgccagtgttcattggctgccccccaggcaagcgcctggccttcgacatcacctacacgctggaatacagccgcctgaagaacaaacactactttgactgcgttaacgtgaacccggagatgccctgctttctcttccgggacagtgtgtgtccagtcccttcccctgcacagttcactgccctcttgcccccactactttgtgctctccctccccattcctctccccgcagactacccaccctttttcctgcggcatctcactttcccccgtctcggtcctcagcttctcgggccaagctaatttcttcttctggtctcaatcccctccaaccccatagttttctaccccttcttcttgattcaagatttggtgacaggagactccggcagtttccagggcaggtaaaggcgtggccagcttgcagctagggcaggtggagggagtggaaggagatgggtgcaggactcgagacccggaggccagtctgtgtgcacttctgtccctggtagctatgttctgctggtggtgggtggcgggcccacactggacagcctcaaggactacagtgaggacgaaatctaccgcttcaacagccccctggacaagtaatccccgtggggtcccacgtgtaatccaccttgcttcccctggaggcctttcccacttccaagccaagcccacctcgcaagcccccacctctgcgtctcaggccctgcccacagtggggctcttaggatctcacaggcaaactcctgcccgcccctaacaccatgtcccctgcacccacctgtggcctccctccacactgaccactgaggtcatacctcccctacaccgccccccaacccctggctgagatgacctgggcctgcacaggaccaacagccttatctggaccacgaggaccacaaggaccaccaaagactcagcctttcacatcatgtcccacgagagcccaggcatcgagtgagtgcgtagcctggcccctcttggcccccatctgtcggtagtccattgggcccacctatcctttctgcccctaggaggcctcttgatccccaagtcacactgactgcctttgtgttacttaaatggggctgaactttgcacaagctgaagtctctgcctggaatgctgctccctccgactcttttcaggccttaggcagatgccccttcagccaggaggacttttctgtttcaagatgggacaattgtcccttcatggctcctatggcctcttggggctctcccatcctggccctgagccccctacctgtgcgtccccatcccagagtggacagctctgggcagtcactgtctggtgtggggtctgtctctcctccagaactgggtcctgaatagactcataaatttgtttttatttttgagatggagttttgctctttgttgcccaggctggaatgcagtggcaagatctcagctcactgcaacctccaccttccaggttcaagcgattctcctgtctcagcctcctgtttattttttgagacaggctccctctgtggcccaccaggctggagtgcagtggcacaatctcagctcactgcagcctctgcctcctgggttcaagcaattctcctgcctcagcctcccaagtagctgggattacaggcacccgccaccatgcctggctaatttttgtatttttagtagggatggggtttcaccacgttggtcaggctgatcttgaactcctgacctcaggtgatccgcctgcctcagcctcccaaagtactgggattacaggcacatgccaccatgcccggttaatttttgtatttttttttctagtagagacggggtttcaccatgttggccaggctggttaacatagcatgtattgaatgaaagaatgaacaaatgaataaatcaattcgtggcaggcatttattgatatctgaatgggggtattaatgaatgaataaaacaatggagaaacaaattcatatataggggctcagtaagtttcattcaatgaaaggaaaaaaatgaagccatgagcaaatgaaggcagtgaatgaacgaacaacttgcacctagtcagaatttaacctgctttattttttatttttatttatttttttgagacagagtcttgctccgtcacccaggctggagtgcagtagtacaatctcagctcactgcaacctctgcctcttgggttcaagtaattctcccaactcagcctcctgtgtagctgggattacaggtgcatgccaccatgccccgctaatttttgtattttttgtagagacggggtttcaccatattggtcagtctggtcttgaactcctgacctcaagtgatccacctgcctcggcctcccaaagtgctggtattataggtgtgaaccactatgcctggcctaacctgcatttattggataatgaataaagaagggaataaatgaaagatgtgactttgtacctagtaagtgctcaagctatatttatgggataaaggaatgcaagcagcaaagaatgaataaggatttggcatatgatagatacacagcctgtaatctggatggatgcacagtgacagaggaattgacagatggaggtgtgaaggcaggaggaaatgaatgagtagacaacctgtggcacagtaggcgttcagtcagcatgaatgaatgagtgaatgaaggaatgaatgagggaaggcatgagattgcacccatttggtcctcaccgaaaacattgggtggaggaagaaattgggagttggcacagactaggcatggttggtagcacaactgcctgatctttggcttgcaggtggctctgtctggagaatgccccatgctatgacaatgttccccaaggcatctttgcccctgaattcttcttcaaggtgttggtgagcaataggtgagccaggcaagtggcccaggtgcgggtcaggggctgcccatggaatgcctggcttctcctctaatcctggatcccctcccaacccctgcagaggagtggacacgagcacctactgcaactaccagctcaccttcctgctgcacatccacgggctgccactcagtcccaagcgggcccttttcatcatcatggtgagtggctgtccgggagctgccctactgggtgggcaggggcccacgcctccatacctatgcttgttataccttcgctcattcattcctttattcactcatctagccatgctgactgaacgcctgccatgccacaggctgtctactcattcatttcctcctgctgtcatgcctccatctgtcaatttccctgtcactgtggatgcagattgtggactgtgtaccttatcatgtgccaactccttactcattctttgctccctgcaggtgtcagctagcgtgtttgtgggcctggtgatcttctacatcgccttctgcctcctgtggcccctcgtggtgaagggctgcacgatgatccggtggaagataaacaacctcattgcctcagaatcctactacacctacgcctccatttccggaatctcgagcatgccgtctctgagacattccaggatgggctccatgttcagctccaggatgacagaggacagggctgaacccaaggaagccgtggagagacagttgatgacctgagtgtcccacctgccccagcccccagttactgtcacgcctctcttatgaggcccatcttgaagatgcaacctgtcacccagcccaggcctctctttctgttttgcttgatgtttacttctcgttcagactcaaataaagccttttttcaggaccagcagtgggctctcttaaaagctcgagttcagaaggtttgtaccagcatagctgcacattaaaatatcataaacctggctgggcatggtggttcatgccggtaatcccagcacttcgggagatcgaaggaggcagatcacttaaggtcaggagtttgagaccaccctggcccacatggtgaaaactcgtaaccctgtctctactacaaatacaaaaaattagctgggcatggtggtgcgtacctgtaattccagctacttgggaagctgagacaggataatcccttgaacctgggaggcagaagttgccgtgagccaagattgcgccactgcactccagtctgggcaacagaccaagactccgactcaacaaaacaaaacaataaataaaatatcaaaaaccttctaggccacctgttaaatagtggcttctctgtgtgcctgttggctgagcctctccccagtgtaccccagacctccctgtggtccagcaggatcctccacaatccaggcccattgctatggccgaccatctgttctgattgttcagtgttaaatattctgaatgtcaacacctatctaatgtcttaaggaggggaccctggagacgtcaggattcttattttagttgcaagtagcaaatatttccctcaaatggtctacatgaaaatggtaatttacaggcttcaggtacagtttgatccaaagtcccaaggtccacaggattcagccttcatttctctgtagttttttcttctctgtcctcctcagagtgcagtctctgacctcaggacaactcccctcaccatctgaggctagttatacagtccataatctggatggatgcgtagtgaccaatgaattgacaagatggaggaatgaaggcaggaggaaataaatgagtaaaaaaataccctgttgcatggtaggcatttggtcagcattaatagatgaatgaatgaaggagcgaatgaggaaaggtatgagattgcacctagttggtgctcacccagagtgttgggttggaggaatacattggggttggcattgactaggcatggttggtagcacaaaaacctgatgaaatttgacaataacaagagttggcaacactcatgtgtgtaagggctgctggctaaggttgtttccaccaccaagattctaccgagtcacctcatggtccaggtgaacacatcataatcctgtatcagccaagtcaacatgttatttaaatatcaccatctgcacttccagccaagatagagtgacagagactggatttcccctcatacttgaaactatttatgttttttgagatggagtctcgctctgttacccaggctggagtgcagtggtgtgatctcggctcactgcaacctccgcctcctgggttcgagcgattctcctgcctcagcctcctgagtagctgggactacagacgcatgccactatgcccggctaattttttgtatttttagtagagacggggtttcactgtgttagccagactggtctccatctcctgacctcgtgatctgcccgcctcagcctcccgaagtgctgggattacaggcatgagccacctggcctggccatatcaacgtggtattttgtttatttgtgtctttttctttttttttttgagatggagttttgctcgttgcctaggctggagtgcaatggtgcgatcttggctcactgcaacctccacctcccaagttcaagtgattctcctgcctcagcctcccgagtgagtaactgggattgcaggcacccgccaccatacctggatagataattttttgtatagtagagacggagtttcaccatgttggctaggctggtctcaaactcctgacctcaggtgatccatccacttcagcctcccaaagtgctgagattacagacttgagccaccacacccggccatcatttttgtttaaaacattttttaccaccacaacttctttcacatattaatttactcattaattcaacacatatataatttctttctttttctttttttcttttttctttttttttttttgagcacagtctcgctctgtcacccaggcaggagtgcaatggcgatctcagttcactgcaacctctgcctcccgggttcaagtgcttctcctgcctcagcctcccaagtagctgtactacagatgtgcaccaccacgcccggcaaatttttggtatttttacatttatttatttattttctctgagacagagtctcactctgtcacccaggctggagtgcagcggcacaatctcagctcactacaagctgacctcctgggtttaagcgattctcctgcctcgggctcctgagtatctgggattacaggtgtgtgccaccacgcacagctggtttttttgttttttttttttggtatttgcagtacagatggggtttcgccatgttggccaggttggtctcgaactcctgacctcaagtgatctatctgcctcggcttcccaaagtgctgggattacaggcatgagccaccatgcctggccaacaaatatttattgactgtctactaatatttgccaagcactgagatactgggaattcagtagtgaaggaaatcgtcctgccttcatggagatgacattctaaatggtggagacggagagtgaaagtcgggtttgagaaaaacgtgctgcccaggcgcagtggctcacacctctaatcccaacactttgcgaggtcaaggcaggaatatcgcttgagctcaggagttcgagaccagcctgggcagtataatgagactctgtctctataaaaaatttaattttttttaaaaagagagaaaaagcgatgttgaatgtgcagatgtaatatcaatcagtggaggaagaagttggtataagaagttgtgaatactggccaggcaaggtggctcatgcctgtaatcccagcatttcgggaggccagggcccagggaatcgcctgagttcaggagttggagaccagcctgaccaacatctactaaaaatactaaaattacgtctctactaaaaatacgaaaattagccaggcgtggtggcacatgcttgtaatcccagctacttgggaagctggggcagaagaatcacttgtacccaggaggcggaggatgcagtgagccaagattgctccattgcactccagcctggacaacaagagctaaactccgtctcaaaaaaaaaaaattgtgaatcctccacttacacatgacattgaaagccatagagctggatgagttttgtaactagttagttcatataagcttgggaaaaaaatgtggaaggatgcattgaaaaagactggagagggagccccaggtacacatcctagctgttagtcctttggaaggttacccagcctctcagtctgtctataaaatgagaataacacagctctccaaatggcacgacacccgctaccttttggcttggagacgctgccccgaaggcggaacctccaggacagctacgtagcgtcccgagcactcagactgaagccagggcagccatgttcattattggaaccgtgaggtgggtagggggggtggtgttgagacagctgtcattttcagttagggcaaaagccaacttccggtcaccatcttgagtgacgacagaggcggagctccaactgacatgttcattaagggcagggctccgagggcgccacctcgagagcgacggcgggctacccggggcgggctgaggcaggttgtagccccgccccgggccttgggctccacctctcggccccacttccgccgggcaagcgtttgtaggcggcgctgccgtaaatcaggcggtctgcttgccgcatcacgcaagatggcggccgcggcggtgaacggggcggcaggcttctcgagctccgggcccgcggcaacctcgggcgctgttctgcaggccgcgaccggcatgtacgagcaactcaagggcgagtggaaccgtaaaagccccaatcttagcaagtgcggggaagagctgggtcgactcaaggtaaagtcggcaggcccaggaaaccgagtgttgcgggcgtgggaggcgctacgaggtgtctggacccaaccaagtcccgggccgcggaagccacctcggtgccagcgagactgaggcgggctgggggatccgatggggtgaaagatttggaacagccaaagtgggggctcggagggcgtcaagaagcgagagagggacagggagcgttgatggtcacgcctgtaatcgcagcgctttgggaggccgaggcgggggagcgtcgcttgagcccaggagttcaagatcagcctgagcaacatagcgagactctgtctctacattttttttttaagtgagagatgactggaatggacccacgcgggggtggtgggggaatgattggaagacttatggcagaactgagtgaggggttagatttttggtgcgtggaggcttaactggtcggagtggcaggattgggattcgggcttttcctgatggtggattccaggcaagaccaagtgggaagtgaggactgcccggagtgataaaagaatgaggctgaaaaggtgggctgtgtagagggtgtgtggttaagaccaggctgggttaggatctgagagatctggggcttaggctcgcatctgttgggagagggggcagcctagttgtgaaggcaggactgaacctagaagaaatattcttacaagtagagaacaagaatacggggcccagagtgcttcagaccaaacatctgttgggagggagtgtaaatccagtggcttggaacaagctgctgagcctgctaaggaaagatgtatgggctgaactgtggggggagatttggacctccccctcccagatatagattttggggatagcccagctaccccttccccaatagattgtggggaagatgggccaagaatggaatgtactcctgtccccaccgccgcgtgattccactgggtcaggcactgagtgtccctccttgtttccccagtggggctattaataattgtaatgtgatgtaatcttaaatgggcatgtgttgcgtgctcaggccctgttctgagtgctttatgagaaagcattcctcatgagtctggatgatggttagctccattttccaagtgggaagaccagagcgtagagcaggtaagtcatctgtatttgaattcccttcttttctttcttccctccctcccctccccatcagctagttcttctggagctcaacttcttgccaaccacagggaccaagctgaccaaacagcagctaattctggcccgtgagtgtcactggggttggttgggggtgataatctgggggtcatggcaggaatggtagcactggtggttggggaagagacctcagtcacctcctgagagctcactctgtcacccacaggtgacatactggagatcggggcccaatggagcatcctacgcaaggacatcccctccttcgagcgctacatggcccagctcaaatgctactactttgattacaagtgagaatgggccctgcccccaactgggggggtggttgcatggaagctcctttatttctggagctctggctgcttgggtcctcttccttcatctgggaactcctcctggcttagttctctcctcagtggtgcagggtcagggcttggcttggaggtcctgagacttggcttgactagtcagtctccccctacccattcccacattgcaccccctctgcccagtggggctgccatcacctttcacgtgtcctggccccagccttgcccctctgactcaaacccctgtggcagccagtaggatcatgtgacactaaaatttgacactgtccataccccgctcagaacctgccgtggctcttcatggtcctcaggcacaagaccaagttctttcctgtggcttccaatgcagttccagctcacacccctctgcctgtgcctgctcatcccagccctttctctcactggactgtgagctttctaaaggcagagcttggaactgtctcagttactgctatgtccctagcactgcctaccacagggccaggcccagaacagggactcactggatatgtgttgaatataaaactgaatgatacctgcacagattaatgattgggaatttgacatcagacaaatctggctttgaaacatccagccgcttcctgattatgaggtcttgggcaaatgactttacctctctcagtttccctgttaaagtagggagtggtgattcttttatttatttatttttggagacagggtcttgctgtgttgcccaggctggagtgcagtggtgcagtcatggctcaccacagccttgacctcctgggctcaagcggtactcctaccttagcctctcaagtagctagggctacaggtgcacaccaccactcctggctcttttattttaattttttgtagagatgggggtctcgctttgttgcccaggctggtctcgaactcctggccacaagtgatcctcctgccttgggctcccagagtgttgggattacaggtgttgagtcattgcatctgactccaataactttttttttttttgagacggagtttcactcttgttgcccaggctggagtgcaatggtgcaatctcggctcaccacaacctctgcctcccgggttcaagctattctcctgcctcagtctcccaagtagctgggattacaggcatgcgccaccacgccctgctagagtccacccaggctagagtgcaacggctggatctcggtgcactgcaacctccgcctcccaggttcaagtgattctcctgcctcagcctccctcagcctcctgagtagctggtattacaggtgcccacgaccacgcccagctaatttttgtatttttagtagagatggggttttgccaggttggccaggctggtcttgaactcctgacctcaggtgatccacccgcctcggcctcccaaagtgcttggattataggcgtgagccaccgcgcccggccagtaactcttaatatagttatagctaacactttgtgtttatttgggccaggtattgttctaatcaccttacctgggttgaatcatttaattcacttaacccttgttcattcaacccatctctacgaaatggatactgtgaggccgggcatgatggcacatgcctgaaatcccagcactttgggaggctgagacaggaggatcacttgagcccaagatttccagacctgcctggccaacatggcgaaatcctgtctctacaaaaaatattgaaaaattagctgggcaggctgggcatggtggcttacacctgtaatcccagcactttgggaggccaaggtgggcggatcatgagcttaggaggttgagaccatcctggctaacacggtgaaaccctgtctctaaaagaaaaatacaaaaattagccaggtgtggtggtgggcgcctgtagtcccagctactcgggaggctgaggcaggagaatggcatgaaccgaggaggcagagcctgcagtgagccaagatcgggccactgcactccagcctgggcgacagagcaagactccgtctcaaaaaaaaaaaaaaaaaaattagctgggcatggtggtgtgcacttgtagtcccagctactttggagtctgaggtgggaggatggcttgagcgtgggaagttgaggctgcagtgagcctgggtgacagagcaagaccttgtctcggaattgaaaaaaaaaaaaagggctgggcgcagtggctcatacctgtaatccaagcactttgggaggccgaggtgggtggatcacgagatcaggagttcgagaccagcctggccagcatagtgaaaccccgtctctactaaaagtacaaaaaattagccgggcatggtggcatgtgcctgtagtcccagctacttgggaggctaaatcaggagaatcgcttgaacccggcaagcggaggttgcagtgagccaagaacgcaccattgcactccagcctgggcaacagagagagactccttctcaaaaaataaataaaaggatactatggtgatacccagtttacactttgggaaaccgaggttgtcatttcactgaagtgaggtcactcgctcttgtatgactcaatatgactcttgtaaatgacttattcatgcatctttgggacacagtttcctcatatgaaaacccaggacctgatacctcttcaggaagatgcatggggcgttgtgaggattcctggagcctggggtagagggctcgctaggcccttaaatcctccttaacctgcttccccatcccacgtccacagggagcagctccccgagtcagcctatatgcaccagctcttgggcctcaacctcctcttcctgctgtcccagaaccgggtggctgagttccacacggagttggagcggctgcctgccaaggacatacagaccaatgtctacatcaagcacccagtgtccctggagcaagtgagatggcaaggggcaggggaggacctggccaaagtgggtggtgcaggggtggtcttaggagggctttcctgaaggagtggccagggttcacccatctttccacccacggacccatcctcttgtttgtccaacaaatactgagtcccagctgtgtgcctggcactgtggtaggttgtcagactgtgcagtgagccaagcaggtgaaattcatgatcttgtggtgatgacactggggtgtggaagcagatagtaagcccgaagagtgagtggcctgcgcagtctgtcagatgctgagtgctgtggagaaaaagcaggaaggagggtggagaggcagggatgggtgatatttatctcggggagtcagaaggcctcacctaaaaggtgaaattggagaaagacttgaaaagggtgaggaactggcttatgcctgtaatctcagcactttgggaggctgaggcaggaggactgcttgagcccaggagttcaaggctgcagtgtgctatgatcacaccactgtattctagcctgggtgacagtgagattctgtctctatttagaaaataaatgaataaaaacatattttttaaagaaaagggtggccgtgcacagtggctcacgcctgtaatcccagcacattgggaggccgaggcgggtggatcacctgagttcaggagttcgaaaccagcctggccaacatggtgaaaccccgtctctataaaaatacaaaaactagccaggcggatggtgggtgcctgtaatcccagctactcgggaggctgaggcaggagaatcacttgaacccaggaggtggaggttgcagtgagccaagattgtgccattgcactccagcctgggcaacaggctcaaaaaagaaaagaaaagggtaagggactgaaccctgtggacagccgggcagaggaaccagccagtccaaatgtcctgaggcagtactgtgtctgctgtgttcgaaggacagccaagaagacagtgtttttggaacaaagtgagcagggccagggcaaagccttaggacctaaggttaggaagttgttcctggagctgacatcttatgggaggatttggtcagtggggagaggatgggagagagggcagttagggcgggcagcacagttcgggcaaaggtgtacagggatgagcctgtggtggagccagcgctgtctccctcctggaaaatagatggataattggacagtagatgagataatgagatgccagcccagagcaggcttggggggagggagggagggaggaagagggggtgagagagagagagagagagtgtgtgtgtgtgtgtgtgtgtgcgcataaaccagcaagggctttctggaagagggggtacccagggcaggggtgtggctgtgtggcaaagggattacaggggcactaggagtgtgatgaggcccacacaggtaggcccctttgcagcctcctcttcattctctcttcttcccccttcccggcttctgcagtacctgatggagggcagctacaacaaagtgttcctggccaagggtaacatccccgccgagagctacaccttcttcattgacatcctgctcgacactatcaggtgcgtagcggggccgggccctgtggagtttggaaagaacttgggcttgagtcggacagctccgagtctgaatctcattccagccattggttgtctgggtaggctaggtgtgtttcttatcctcctagcacctcagctctccttttcagtgaattgggcctggtcatgggattgtggataacggctctcatctcaccacccttggctgttgacatgtgtggccacgtgtgtcaaacctgagcatggaattggttcagcaggcagggattgtgcggcctgtcttagcccatcttccgtcctagatacccatccagtgagtcatgagacttcacctccggccaccaaaactgtggaaccctcagtttctccttctctagaatgggttgaccaaatcccagcagccccttgggttgccgtgtgcacaagtgacatcccacgggcagatggatgtgacatacaaatcccttgaggagtaaaagggtgtcgaagtggtggctgagctgatgcactcgggcagagcaccaaatcagaatgagtttccatgccttaggtgcaaaggcaagcccagaggcattcgagtgaggagtggtagccagtacccactacctaccgcatggcctaagcgatattggaggcactcctccccatcactggcttttccccagagcttaccccctccctcactacagtgacttcatgccttgctctatttctacttcggtgttgttcgtggtgcctcttgatgggtacaaggaaccccctcaggatctatgaagtggggtgcagcaccctggtgatgggtgttatgagaagagatgccctcatgtgagtcccaagctgggtttcagacctgaaatcctgtggctgggagtgggattcagagtgtgggcccaggagtcagagatttcagtggggatcacccgtggcccttgcttgctttgcgagtctggtcaagtttctccccttctgagccttgatgaataaaacagggcccttcacatattcctgccatcagtgctgaactccagggtcagagctgacacatgtcaggtctggggggacaggtcctgggaggttgttgatgctcagtaatgaggagcttctcatcttcccccagggatgagatcgctgggtgcatcgagaaggcctacgagaaaatccttttcactgaggccacccggatcctcttcttcaacacacccaaaaagatgacagactacgccaagaaggtggctggggtacagggcaaggggccgtgggaccaaggggtgaagtcactaacaacagtgtggggtggcttagagggacactggaacaagactgcccaggtttaagttcaactgtgtgactctaggcaagctgccaaagctctctgacatcagtttctctatccacagaatggggctagatacatgggatgagcttagtacctggcagcagctggaggtgggcgctgcacgcatgttggctgctgtctttatcaaaatttcttagaggtggcagctttttctgcaagactttgcttcatttggtctcaggcgtttgagcacgagcaacgcttggtgttgcaggaggagggctgggaccaggctatggaaggtgaaattgggctgggtgcagtggctcccgcgcaccaaggtggatcctcccacctaggctcactctgggaggctgaggtgggaggatcgcctgaggtcaggagttcgagaccagcctggtcaacatggtgaaacctcatctctactaaaaaatacaaaaaaaattagccggatgtggtggcgggtgcctgtaatctcagctactcgggaggctgaggcaggagaattgcttgaacccaggagggtggaggttgcagtgagccgagatcacgccattgcactccagcctgggtgacagagcgagactctgtctggggaaaaaaaaaaaaaaaagaagaaggtgaaattgaattttagtgatggtgacagctggtaactgatctgtcactcaggccaaacactatcctcagtgctttaaagatgttgattcaccaaatcctcacagttgacccagagaggtgtgtaattagggtcccagtctcaacacagagaaactgaggcacagagaggtgaagttacttgtcaagggtcgttgggcagagtacgattggtgagaaaagagagcataggacacgtgggcaagtgctggccccatagggtggggatggagcctttgtgatcactctactcgtctctaatccctcctttcctgcagcgagggtgggtcctgggccccaacaactactacagttttgccagccagcagcagaagccggaagacaccaccattccctccacagaactggccaaacaggtcatcgagtatgcccggcagctggagatgatcgtctgagccccccgggcactgggtggggcagggcacgagttatttaaaacagttacactgcagggtttcgcccaataaaggtggactgacattccctcttccaggcccttgtctccccagttgggacggcagagagacaagttcttatatctgaagaacttggaggttttggggcattcaggagttggagatagcctccaactgggtcagcctctgtctggtgggcattgctcagggtctcaaacatggacgcccactgtggggccccagcagcactgtggcctgcaggagggcatggccccaggtagggggactgttctagccagctgtggacacataggaatgctggaccagggtaccagattttttcaacaaagggggtgaagtgtcctactaaaaagaataaatgttggcagtgaattaaacaatttttcaaatgacatgtgaaatggaacccatctgtaggctgccagtttgggctctttgtggaacaaaaggtgtgggccctggtgtgggcttgtgggtcccaccctccctgagccagcatgtgattgaggacctccccgcacaccccccagcctaggtttcctgccttgaaattcttgggaaggtgttcaaggcgcagggtccaaatctggctgaatcccttgtgggatgtggaaatttcacaagtcttccagagttagttttcccaactgtgaaatgggaatgatcactcctttgcaaagtggtttgtgctgagcctgtgagcttggtaccaggttagctcagaattggggcttatggattaaggggaatcagatcccccccgccctggacccatcagtctgggtgctgggtgaatggaacctcagttactgctgctctggtccagcttcacgattgtttccaagatgtgctttaatggcgatcctgccctgctgcaccctacccactgccttggcgagtgattgacaggctgctggcatctggattggttattttattggcatggaggggaaggtggagggtgttgagccgactacactcagttggaatgggtggcctgcaagtcgtagtgctccagcttggccaccagagagccggacagcttgatggtggcaacccagggtggctcgcccaggtggttggtggatgtgctcagcctagtgggggagggtagagtcagcaaagcccagcaatgggaccaggcctctagcccttctagggcctccctgtccccatatgaatagggaagcttctgaaggctatattggaatatcccaaaggcagtttagggcagggctgtggccacttaataggaaagggagctgagggctggcgagtgtcccagctaagcttcaagaggtccagggcagtctcccagtggttcagcactcccaggagtcagtatcagaccccagtggccagatctggtgattcagtgtgggtagggggtggctggaggatgcattgtccccctggatgtgggactcaggaggagcctccccagcacaagggctgggacatcagtgccctctggcggctgaagccttgagtcccagagtcaggagaagtcctcagaggctagaggggtcaggagtccagggctgcccctgtgcccagtaaagttggaggcgtgcatctacccccatttagttccaggaagacagtcatcccctcacccccatccctgagtggcctcggacgtggtcctccttgataccctcagggacagggtcaaggcagtgtatagggtcaggccagctgggaccagcctccctctctaatggctccaagagaggtacaggagggccaagagtccacttagggattggatgccatagggctgggccagggtgtccccctttccccgtcaaaggtcagcatgggatcatgggtcctcttggtcctgaagggtgggagctcagctaggtttgagatgtggcagagatgaaggccacgggtcattctagggtcaggaagccaaagggctgagtaggactctatccagcagtctggggttcggcaccctcctgtcccttctcccctctcaccaggcagagacgttgcgtggcaggcggcgatggcgtggctggtggtggcagtaacacttgcagggacaggagttaagcacctggaagggcagccagtggcgcgcagcgcgggtgttagctgccccagtctgagaggccccgctgccaccaccccctccaccactgctgtcaggcacggtagctgtagctcgttcgcgaggaccatctccatgcaagccatccttacgggtcgcgccccgggctgcacgggaacccttgttcctgcgcgtgcgggtcttgatgggcgcagccgcgggtgcgggcgcggacacaggcggcgagggctcagccacggtgggagctggagccggggatggggccggggcctggtcggcggctaaggctgggggcagagcaggggctgcggtgggagccagggctgactccttgtggcccagacccggggtgagcgggggagccaccggcagcggcgttggctggagcgctggtggctgcagtgtgggcggcggtgtgggcggtggcagcggtggtaactcctgcaggcctggaggccccgggcgcatgggctcgccattggtgggtgctgggaagatgaacgtaggcggcgccagcagggcaggtgcgggcctccggggcccgggagctgagtgtatctgctctggtggtggcggaggggagccccaaggcccagagagtgcggccgcacgccgtcgcggcgccccgatgcctccgccagccccgttgaagcggaagtggcgttcagggccgtcgggagcgctaacccagtcgaatttgggcttcgagcctgggaaggtggtgtagggtggcggcggtagggcccgggcttgggacgcaggcgccgagggaggaccagagcacccttcgccgtctccatcacctccctcggcttcctgtgcccctcgagaaacctctcccaaggggcgagcggctccaggaggcaggggcccttgcttcaggacctcggcgtaagagatggcacctgaggcagcaaagaggccgccgcctccgccgccccccagcgaagctttggctgctaaggaactcgaggctgccggaggggccaaagagggcctcgacttgaaggtgattttacacagcaggctcagaccggactcggaatccgcaggctgggccatttcgccttcgcccgcatggggaggcgcccctccgcgagccctgccggccgtctggccctggttgcggggcccagcctggctttctgtcgggggtgaggcgggtgtggccagagcaggagtgattctgcggtccgccggctgccgttcagaaggtaatggtggtggcggcttccaagtctccaggggcggcggaaattgggatggggccctcgggacagtgtccttcacggatagttgccggggcggcggcggcggcttcagcgggcggaggctcggagggtcgccctggccgcgatggctcgcctccagcaggcggcggatccggggaactggagtgcccgcgggcttttgccatttagacgggccgggcagcagagtccccgcgggggccgggggtggtgcagagaccgcggccgcctcttcaggagggggcatcactggagagggccgttctaaggtgaggggcagggtcgagggtgaggcctggggctcccggggtaccatgagtcccgggggtgtggcgctgccagggaaccagacacccagcccacgagtcaggcgcatggcctgggaggtcatctcgggctccaccagggacgtccggcgggagtcgggggcgcggtccgagggctgcacttttcgggagcccccgcccgcggatggctccgactgcaagttccccatttctgacggagctcggagactagtcagaaaaatttactccagtcagcctgccagggccgtggggaccctacgaggctggctgtacttgatctaatgcgtccgcaccggccccgcccctgttctccaagatccgatcaggcccaagtccttaggtcgcactcctgttccccgaccttcgacactcacgccttcttgcccatgtccccaacacagctgctgttaagatacttcactaccagccccattatgtactaaggttccatgcctgtccccttggctggtcatgctgatccctcagtcctctcctctaactctccgactccccgcctctctctagagcacctgggtcccgccctcttcccaggcaggggcagatcctcaggcctcacccctaaacctcttcccgctccaggtctactagctggcatccacagtcaagctccacccctgtccccaagctccgccctggccccgcctccccccagaggaacccactcaccgagtcctccagccgagcagagttcagaccgcggcgccctgggcccggggcagggcagggaactgccgtagcagaaaataaccgaaaagaacgggggtgcgggtgaaggcaagtgggcgagacaactagggcggaccccgagatgtaggccccgcccccggagctcgaggccccgccctcctgcgagcccgcgggagcccggccccttacgaacctaggtctccccttgaaatactccgaggtcttgttcctcgcccccaggccttctggttctaagctccacccctttgggttgttctccttagcccctcccctttagaatgtcccgcccctctcattccctcccgaggccccgcccacgcgaacaccgatgcgtcgctcctcccctttggacctctcatctgccccgcccctaaggcaatttacctctaagctccgcctttttaagacccggcaacatcgcttctcaagaccctctccttccccccgggcgccgagaaggcccatccaccgtgggcccgccccttcgtgacgcacgcactagtcctcgcctgcagcatccaaacctccttatacccaggccctccaaccccacccacttgtgaaggctcccctctcgccccaccccttatcgaactctgccaggcacccaagccacagcgtagaccaccacctctttagaaccttgagaccagtccctgtccctgccccgtcccctcctcatagcattagagaccaatggcgcagatgggtggaaaagtgggggatcccctctggatcttaagaaaatgggggctggggggttgctctctggagctagtgccgggctctaggacccagcaggcaagtaagcccgcctcgctcttacccctcccccaagccgccccttccccccccacccgtcttccaggttccccctccctcccccctcgccccggctcccggtgcccgtctccagcgccgccggagccagccagggagccggaacgaaaaggaggaggaggaggccgcgtcgccgccgctcggagcccggccggagcctcgcaggcaggtgccgaggggggcgagggggcgggggctgacagactgcctgccccgatgagggggcggccgtgaccgcgctgcgccttctgcccacccaggcgcccccaaggccccggctaggaggactagagagtggggaccccccaaactgcgcggcagccattcagggtaccagtcttcatttgtggggtctggactttctccgaggatgccccattcacaaaattccgtcctggaccctcaccgttgaggaacgctgaggaccactccccccgggggacacaggatgtgtggggagcgtaggccaccctgaaatgccagtgccccattccagctaggccctggggggacccctgctctcattccctgcttcacctgttgtcgggggaggcgggcggacaaaggaagcagcgtcacgtgactgctcattcacaaaatcccatcccattgagaaaagggggctgggggcgctgcagccgccccttcccctcctgaagggcccgggaaacccagcagcctgcaggtgggggagggggctagagctcgtccgggtccctaaggttgggacgccagggtccctgtgctggatggcagtgaagggctggacactgatcccgattactgggcggagggctacgtcctctgagctggggggcggggtaaaatggttctgaaggatgctggggctggggggcgggaagggaagagggaggaaggatcaatctgcccccccatcccatctttcccccctggcttccctcggctggggcctgggggagcagccttgatttttgtgaatgaaatgctctctggatgtgtcttcggtcgcccgtttctgacttcctctgcctccgtctccctctgagcctctctttctggccatttctggttctctccctgttccctgcccatctcccgttgctgggtgactcagtgagctttgcatccggtctcattcataaatccgggaaggggtgggtgggggggaaagagcctgggtttctcacccagcctgtggcctggacgacagggtgcggaggcagggttgggagaacaggagctgagttgatgggcccagagaaaatatatatgcgcaggcacccagctgtgagggggagcactgggtggggctgtgggtatgtgctgagggaggagaagggggtgatagggataagcaggagggggagggaagggcaacaccagggctatgggggtggggacggagagatgggggaaaggtgggtacagagagaaagggcagacatggagaagaagatagaggtgagagagaagagatggcatgaggaagaaaggagctgtgtggaagacggtggccatggggttgaaggtgggtattgctagcttagggtgcagtggacctggacgtgagagatgaagttggaggggagatgagggttgagggaacattccatgggagagcagggtttgagctcatgactgtgttgtccctgtccttccccccacctcctgcaggtacatggtgcgggtccgagctgtggtgatggcccgagatgactccagtgggggctggctgcctgtggggggcgggggcctcagccaggtgagcgtgtgtcgggtccgaggggccaggcccgaggggggggcccgccaggggcactacgtcatccacggggaacgcctccgggaccagaaagtgagccaccctggggcatgcggggagggtagggacctggggagggaggggagaggggctggcatgtggagcagaggtcaggttgcctcccagcctaggaatcaagctggggtgtgaagtttgggagtgaatatctgtcctgtagataagagttgggaattgcaggatacatggggtgtttggagggtcctgtccactgccacttccagccagactatcctcgctgtctccctgtactgctcctcctccccgctccaaccccaggctgttccacagggggcactgcccccccccccccgccccgactcacaccatgtccctcctctgctcaaaaccctccatcttgctcagagatccttgccacgaggccctacaccacctggcccctgtctgccctaagtatagtgaagcatttgctggggtccatttgaaagtgtcagagatggttgacaattctatacatgggttcatcaggaataactgggctgtcgggcacaatgtggagggacagtgttgaatcagtttcagctagggatgtagtagaaagatatggattgtgtgaaaggcttgggggaaaggttttttttttggagcaggagtcagtggagggatttgaaatggagtgaaggaatatggtgatactaggcaaggatttgagggaacatcaatagggtgttggctagcatctgaaggggaatctgtggaagtctgataagactgttttggagtaagtgctggctgggtacagtgcctataatcccagccactcatgagtctgaggccggaggaatgcttgagtccagagtttgagaccagcctgagcaacacagagagagctcatctggaaaaaaaaaaaaaaaaagagagagagaatattttttgggtaaagtttccagagattattatcagaagaggattcacaataatattgtgagatgttcagtaaagtctgggaagtattgttgagccagaggggggatgttgggttatcagaaaggggttaacaatgttttgggccattcagcaagattcggggtttctacaggggcatcagagggaggtattaggaaaatgtagggatcaaggggttgggaaaatatttgagcatcagaggtgtgttcagtaaaattgggcgtagctgggtgtgggggttcatgcctgtaatcccagcactttgggaggctgaggcaggaggatcacttgagactgggaggttgattccgtagtgagccctgatcacaccactgcactccagcctgggtgacagagtaagactgtttcaaaaaacaaaacaagtaaaactggggagtcgtatcagtgttgatcagagttcagggttacacttagggttgggaaatgaggtttgtgagaagacactagggtatgcatgggggctggtgatggacgagacgtcacaggcatgtctgggttggggtatctgaccctgctttccttctgcccctcagacaaccttggagtgtacactgaagccaggcttggtttacaacaaggtgaatcccatctttcaccactggagcctgggtgactgcaagtttggactgacgtttcagagccctgcagaggctgatgagttccagaagagcctgctggctgcgctggccgcactgggtcgaggtgagcagcccaggtgatgtgcactgtgggctggcctgggagcgggaggagaagctgggctcaaggaactcactctctgcctctctccctgccccaggctcactcaccccctcctcctcctcctcctcctcctctccttcccaggatactgcagagaccccctgccctctgacggtgagtgtccaggatgcctctctgctgggggagggtaggggttttgtttttattctatgaacattcttgagcacctactgtgtagcaggcaccatgccacacaccgggtacacaaaattgggccggaactatgagtgtcaattcaatcccagttattctagtctttctgccctgtcatgattcacacgttcattcaagggtccttattgtgtaccttctgtataccaggcagtgctttaggcactgggttacatcagtgaacaaaaagttcctttcctcctggagcttctattctagtgtggaaaggcagaaaattaaaaaaaatatatatataaacaataaaaatgaataaatattgaaagtaaatggatgaacaaattattgacaaccccatgcttccagttactcaggctctaaatcttggagtcatccctgactccttatcttttatgcgtctcatctcatctgtcagcaaatattggttctactttccaaatcatcacaatctgcctccaacctggtaccatccaaactcatctcccaactggaccatctcaatagcttctcactgtcaactccttccctcctgcccccacacatagccagaggatccctatcaacggctgagtcagatcatgcccctcccacactcagaagcctcccagggctccaactcactcaagtaaaggacaaagtccttacagtggcatatgagatcccatgccatgtggccctgtgtgtctggccccctcacttactcggcttcggccacatggcctcttcactcttattctaacgtggcaggcacagccctgccccagcgcctttgcactggctgttgcctggaacactctttcccagatttccttgtggctcattcccttgtttctttcaaggctttatacaaatatcatcttctcagggagggcctccctgagtatttaaacttaagtattccatttaaaattgcaatctgccaatgccccttgtctagtgctaaatttttcccatgttctaaggcattttccttatttcctttctgaaaatactattatctttttttttttttttttttttgagacggaatcttgcactgttgcccaggctggagtgcaggggcacgatcttggctcactgcaacctccacctcccaggttcaagggattcttctgcctcagtctcccaaacagctgggattacaggcacccagctattttttttgtatttttagtagagacgggatttcactatgttggtcaggctgatctcaaactcctgaccttgtgatctgcccgctttggcctcccaaattgctgggattacaggtgtatttcccggcctattttcttatctattagtttacggtctatctcccatgctagaatgtcagctccaggccggcaaggatcttttgttcgtttcttgctgtgtctccaatgcctgaaacagtgcctggcacacagtaagtgtttagtaaatatgtgttgaataaacggaatgaatgaatgcacataatatcgggtgcaatttggcacttgctggaaaccttgggagttgcctaaaacacctggaggaacaaaactgattccctgggcagaaaaggggagggttccagggtcatgggagatgaagtggggccacaacagttgcagacagttcccatccatggagcacttacccgggaaagatgctctgctgtccaggccccctctggaatctgcacagtggtcttcgtgagtctggcacgtcgtgggtgctcaatgaatgtctattgaaggcagtgtgcagataaggtaggagttatgtccaagtggcagaaaggaagctaagggtctgagaagtcgtttcagctagtttcagaacagaggctggtttgcatgggaaggggagcactcggagtgggcgggactgccccaataacagtgtggggctgggagtgagagaggaaggcagctggctgcccaggggagagggattctgagaagcgggaagacgattagatgttcctcaggtttggcgagctgattagatcaggagaagagtcccacaaaaataacaataaccatttccagctctcccagtacttcaggcatatgctgtgcccttgacagtggccctaaccgcatccttatgaataggtactcttaggatccccgttttacagaggaggaaactgaggctcaaagaggtgagctcacttgccggaggtcacacaaccagtcagtgacagagccggggtttgaacccaggccttcctggccgcagagccctcgctctcaatgggagggggtctatgtgagggcatcggctgtgcgggggcgtgtccccgcgctgaggccgccaatctcctccagtcccacgtggacagcgactcctcctccagtcacagccgccaggagactcctcccagcgccgctgcggcccccatcatcacgatggagtcagcttcaggcttcgggccgaccacgcccccccagcgccgccgctcctccgctcaggtgcgacctgggagcctggggctcctgggggaatggggcggtgcactcggggcccgaagggagcgggagccatggcccggggaggtggggaacacagattccaggggatggctgacctgataactgggccggactgggagaaagcggcggggaaatagggagaggcttggaggcctgggtttctaggaggcttgggtgcgggcctcccgagtctccttgcgctcttggagattttgaggggtttcgaagtccagagaggtttaggaccattttcagagtgtatatttggggaactcctggaagaggactgttaaattcacggggagggtgggagagtcggtacccagaagggtaaaagaggcccaggaaccaaactcctgcgcctttaaggaggaggtggctgggtccagaacccctggatctcaaggtagagggggctgggagctggggctcttggatcttaagagaggacaggactaggaaccttcggcctctgggtccttaaaggtgtggggttggtgcgtggattcctctgtctgtccctggagaaaagtggggattgagggaccttgggagagaagcaagctggggtcttgaaaatctgaatcccagacccaagagtgcgctagggaactggatccttgaggctaagactgggatggattctgatctgtttgtcccttcgttccgcagagctaccctccgcttctaccgttcacggggattccggaaccctcagagcccctggcaggggcagggggcctggggtggggcggccgcggctacgaggattaccggcgctccgggccacccgcgcccctcgccctgtccacctgcgtcgtgcgcttcgccaagaccggcgcgttgaggggcgctgccctgggtcccccagcggcactacctgcccctttgaccgaggctgcgcccccagcgccccccgctcgcccaccccccggcccgggcccatcctctgcgcctgccaaggcctccccggaagcggaggaggcagcgcgctgcgtgcattgccgcgcgctcttccgtcgcagagcagacgggcgtggcggccgctgcgcagaggccccggacccgggtcgcctcctggtgcgccgtctaagctgcctgtggtgcgccgagagcttgctctaccactgcctgtcggacgccgagggcgacttctcggacccgtgcgcctgcgagccgggccacccgcgccccgccgcgcgctgggccgcgctggccgcgctctccctggcagtgccctgcctctgctgctacgcgcccctgcgcgcgtgccactgggtcgcagcgcgatgcggctgcgccggctgcgggggtcgccacgaggaggctgcgcggtgaggacggcctggtgggtcccctagccggcccgaggacccaaaattgagggtccaggaccccggactccgttcggacctaaaacccaaacctaggcacatccggaacttggagcttgagtttggattgagagatctcagacctggaacctggaacccaaacctaggactgagagaccccagccccagcttcattggggtgtctgtctaagaagtcccaggcgtcctgagttctggcgttcccccacccccacaccccacgaggaggctccaggcgtccccatactttgcatctcagaaaggccagggagcacatagatcccgaaaagggcaggtccctgttgaaatgaacaacctagaacccggtcacgcctggcaccatgtccctcagattacagccccacaattagtcaggacttgcccataactggctctgcctttattcaactcccagatcagatcttgagaccataggacctggagtcacccacaaacagttcctgaatattcacctaagacctggtgcccccacatctgagacattctcatagtcccaggacccctgagacagcaggacccctgagaaagtttcaaacagagtttgaaactctgttatgctctggaatctccagatgctgcccctcaaatctacccacgacttagtgcccacagacctggcctccagtccgggaacactgaagtctaagatgtccagggaactcccagacaccctgggaccccagactcttaagatgcactgagtgctcggatatactgaaacacgagctgttctcttaccaaaatgacttgggagacccatcccagagcccccaagatccagatatcagacaccaagatgctctggaagccagggatcaaagacctccataggtccacccacccccaagccagggttctcaggagctttggatatcatttataggactcagaggtgcctggggtcctcagatgtgcgactgaaggccaccaacacctcaggacccgagatactggtctcgagttctcaaatagccctctcttgcagtccctcctggacctggattttgagaccccaaatgtcctggaatcttcagcttctttctacccacagattcccaaccccttaagggctgggagtccagctcccagaagaggggatgctcatggtgacccagacctctgatgcccttggccctcagcccttgagtgaccctaaggtactttaggagcactggatccaataccccaaaggtgccactgacccccaaatgcaaggctcaagaccctacaacattgggattgttcctgatccaagaccttcatccctccataccagaggcgttcagattcgaggtgccccaagaccccagcaccctcagaccccagatttctttggattcaaacctctctagtctgatgaaccccaagttgcctctacacctgattcccccatccccacttgtcggacctcagagacctgctgccccttgaatcctgtcatccataggcccctaaaaccccaaggttccagcctctggaattctggtcccaaggatcccagcccaagcccccagcaatcctcagaattacccctttatcttagggtgggatccctaccatttggaactcattgtaggaccacccagggtggggcacagtggctcatgccttgtaatcccagcactttgggaggccaagggaggaggatcgcttaaggccaggagtttgagaccagcctgggcaatgtagtgagaccgtctctaaaaaaaaaaaaaaaggaccaagtaggagctccctcactgtcacgtctaggacccagcattgtcacagatgattatgcagggtcttcattaagtgaaggcacacagcccagggtttcgaggagctggaagtcacaccagtctgctggccacactgtgccctcagaagaagtgtgtgcaatggaaactttcaggctagttatggctctgctgtcccacagcccccagtcttgcagaccttccttcaagcacaaccttaattcctagtccaggttcaagtcccaccttttatgttctccccctccattaaccccttctcttcctatttatttatttatttatttatttattttgagacagagtctcgctgtatcacccaggctggagtgcagtggcacaatctcggctcaccacaacctccccctcccgggttcaagccattcgtctgcctcagcctcccgagtagctgggataacaggcatgtgccaccacacccagctaattttttgtattttgagtagagacagggtttcaccatgttggccaggatggtctcaaactcctgacctcatgatccacctgcctcagcctcccaaagtgctgggattacaggcatgagccactgcacctggctctcttccactttagagtgagaagttgcttcaggaagtttgaaagcctgtttcatggcccactgagtctcttctgtgcaaaggggggtgccacaggcttttttcccccaagtgaaatggggcttccagtggatcgaagatctggtgtcctgtatgggggcctcaaggtcttggagcaagacagtctcaatgttgtatgggcttgggacctgcatctggccccaagcatctggaactgtgcacttaacctttcttcattacccagacttggatggccttgttggggttcaagggataggtcctctgtctcttcctttaaattattaactatttattacatccggaacctgtgagattcagcactcccaaccagaccctgggatgggtgagagaaaagcgggggtgtctctcccctccccactctgcccagctctcatcactgtcagacccaccagagctgagggcggagggattgggggctggggcagcctgggtccccatgcccctctctgtgcctcggtctccccccttccatggtgggcgggggggaagctccattcttaacctacctcgttttggggaggggtgggacgggggaccagagtgctgtacggtgctgtgggatctgcagatgaagcggtgggggctaaggaaaggtcccctggccgccacttcccagcagcgcctctcccaggtcccccagtcctgctccctgctgagacccacctctgatccatgattccccttcattgcccccaaatcaggggtacatggagggccgccctgggagccaggcagacctcagaccctggagcccccaggcccaatttcccagccgcttgcccctcagatcggatgcttggcccccagatttgggggaggcaccccaacatatatcttcctgatcttgtttctaagccagtctgtgacctcaatattgttagtgtcagtgcaggctgaagtggtgggggaggatgggggccaaagacccagccttgtcatcgggggagggggcacgagatctgctccaagaaatgtctgtgacaaagtctcagcctgtgttatttatttgcctctgtgcaccccacccactcaccttcctgaactgctaaaccagtctcctacttaaattctcccttctcccatcagaccctcaagctgagttttataagacactcaacaaatgcatttattgagcacctaattatgtgccaagccctgttgaaagcactggagataaagcagtgggcagaacagacaaaagtccctcctgcaaagagcttatgagctttatagtaggggagacaataagtaaatgacttaatatgttagaaatgatagaaagcagaaagaaaaaaaaaagtgggaatgggggatacatgccattttagctagagtggccaggttagaccctcctcaggagttggcatttgttgttttgagacagagtctgactcggtcacccaagctggagtgcagtggcatgatctctgctcactgcagcctctgcctcctgggttcaagtgattctcctgcctcaggctcctgagtagctgggactgcaggtgggtgccacaacgcccggctaatttttgtatttttagtggagtcagggtttcaccattttggccaggctggtctcgaattcctgacctcaagtgatccacctgccttggtctcccaagtgattccaggtggaaatctcccaagtgattacaggtgtgagccactgtgcctagccaggagctggcatttgaacaaagccctgacggaggtgagggagttctggggatgtctgcagggaagggtattttaagtaaagggaacagccagtgcaaggccctgagacaggagtgtgtccggtaagtctgaggagcttcagggagctagagtgttgagaggggaggaagcagagaagagagcgctaggagatgagggcagagaggcgatggggcagatctgtcaggccttgaagggcattgaatggacttaggtttttaccctgagtgagacggagccacaggaaatttcaaacatgggaggcatgtgacctgactcagttcacaggctccttctgctgcatgtggtcagcagagtaggagtggggtgggggacagcttcacagagaggaggctgctgtgatggttcaggacaagacagcagcggacaggcccagggtgagggccctgaagggtggagaagtgggcaggtgttgggcctactttgtaaatagaacccacagatttatgtatgggatttgagatagaggagtcaagatagtaagtccaggtttttggctggagcaatttttttttttgttttaaattgagttcatcacccaggctggagtgcagtggcatgatcactgctcattgcagcctcaaactcatgagcccaagtgatccccccacctcagcatcccgagtagctgggattacaggtgcacaccaccaagcctggctaattttaaaaatgtttttgtagagacatgttctcactatggtgcctggtctggtcttaaactcctgggctcaagcgatcctcccacctcagcctcctgaaaggcggggattacaggtgtgagccactgtggcccacctctgggcaatttttaacatttgatttatgtcaaaaaatagccccccaagtgtcctgccttggggtaaacagggttatggggttactcgtatctgcccttaaggaacaagttctacccctgttcttccctccaggctcctggtccacccccaacttccagcagaattgtctaggaactactggataccaggatacagtaaggaagagattagatctgacacaatgtttacttagcaacagcaacaaaacaacagcagtagtaacagtggaaataggttccgtggtttaagagtatagagtctggaatttcatcttcaagccttggcatcaccatgaattcactctgtgacttatcttctctcaaccttagttttctcttctgtaaaagagataagatacttcgcccaatagtacacattaaatgctgtatatatattagttattccttattaagtactccctatatatctgctaagcactttttacatatgaaactctaattaatcctcagcaacaactctaagaggtaggtactattatccccattatacagatgggaagcaatttggcaggaacatggagctggcgagtaacagaatcaagccctaaccctttgcctgattcctagggtgtaatctcttaaccactatggtgcattgcacctgctcactccaaggcctaagagggagaggagtgaaggcctaacaggcacatcgtgatcgatgaggagggcctggtgtgtgaggggtgtgctgggattcctgggtcccttatgtaattcaaaccctgaggtggaaaggagggaggaagttttggattttaggcagagttgggtgaacaccactccgtctgggctgctttaagagcagaggacagggccaggaacactggctcaagcctgtaatcccaagctttggaaggctgagagggaaggattgcttgaacactggagttagaggcaaacctgggcgacatagctagacccctctctacaaaactttatttcttttttgacacggagtcttgctctgtccccaggctggagtgcagtggcgcgatcttggctcactgcagtctgtgtctcccgggctcaagcaattctcctgcctcagcctcccaaatagtggtgactacaggcgtgtgccaccacgcccggctaatttttgtatttttattagagatgaggtttcaccatgtgcccaggctggtctcgaactcctgacctcaagtgatccacccacctcagcctcccaaagtgctgggattacatgcgtgagccaccgtgcccggcctctacaaaactttaaaaaaaaaaaaaaattggccggttgcagtggctcacgcctgtaattccagcactttgggaggccgaggcaggcggatcgcttgaacccagcagttggaaaccaggctgggcaacatgaggaaaccttgtctctacaaaaaaattaaaaacaaatcagccaggcgcggtggtctgcgcctgtggtcccagctactaggtgtaagccaccaaggctgactgatttttaaaaatttagctgggaggctgaggcgggaggatctcttgagcccagaaggtcgagactgcagtgagccgcgatggcgccactgcagtccagcctgaacgatagagcgaaatctgcctcaaaaacaaaccaacaaaacaccagcagaagacaactgagggaggaaaaggaaaatggcaccgaagttgtttttatgtcgccgcaacagtgacacccgccgccagcttgtcttgacagcggagatcccgaacgcactgcaatttacagctccagggggcgttcctacaaccccgacaggttagccgaggggcggggcgggcgggccccggggcgggttcggcgtcctcctgcgccaatgggagcacccaagcccctgcgcgggaagatgccgattggtcagtgccgccggacgctgcggggagctcgtgcgcgcggcgcttttggggcggagcctgccaccggccgccagggggcgcgccgagaccacactttcatggaggcggtgaaggcggaagcgtgggagggggccgcggtggcccaggacctgctggctctggggtaaaagggtgtgcggtgaggctggtgggtgcaggaaggccaggtctgccccctggacgcggacgaaaagggattcccagtgacatccccgccccctcccgctgcctcggtccccacaggtatggaggtgtcccgggggcggcgtcgcggggcgcctcatgcccagacttcagggggctgtgcgtgcggctggcggcggagctggcgacgctgggcgccctcgagcagcagcgagaggcgggcgcggaggtgctgagcgccggcgacggtaaacacggagcgggagggtggcaggggggccgccacggggccaccgagccctgacacccctgtcctcgcaggccctggcgcggaggaggactttctgcggcagctcggcagcctgctgcgggagctgcactgcccggatcgcgcgctctgcggcggggatggcgcggctgcgcttcgggaacccggtgccggactgcgcctgctgcgtgagtcccgggatgcagaagtggcaaggccatggcctccggagcggcgggctctgactttttaggggaaatcgaggttcccaaggggtgtggtcagaactttggggcggcccagagggtacgaggtgggtggggtgagcatgttggggcaagcagagcgctctaaaatgggcgggggtagaatttcgttttattttttatttattttattattattatttttgagatggagtttcactcttgttacccaagctggagtgcagtggcgtgatctcggctcactgcaacctccacctcccaggttcaagtgattctcttgcctcagcctcccgagtagctgggattacaggcgcgcgacaccacactcggctatttttagtagaaacggggtttcaccatgttagccaggcaggtctcgaactcctgaccccaggtgatctgtccacctcggcctcccaaagtgttgggattacaggcgtgagcccaccacgcccggcccggggttagaattttaattggagggcctaggagctcaagtgggttggattaggaggaaggcttgaggtttcaaagtgggcaggagtggaattcgtaggaggggacagggtctcaaggtggggcttactctggaaggctttaggtgggggggactagaaggtggaggattttgttttgttttgtttttaagtggaggtggggtctccctatgttgccctgtctggtcttcaactcctggcttcaagcgatcctcccacctcagcctcccaaggtgttgggattacaggctacaggcatgagccactgtgcctgggcaaaggtggaggttttaaagccggtggagcctcttttttttttgaaatggagtctcgccctgttgccaggctggagtacagtgacatgatctcagctcactgcaacctccaacttcctggttcaagcgattttcctgcttcagcctcccgagtagctgggattacaagcactcaccactatgtcctgctaatttttgtatttttagtagagacacagtttcaccatgttggccaggctggtctccatctcctgacctcgtgatccgcccgcctctgcctcccaaagtgctgggattacaggtgtgagccaccgcacccggccatcagtggagctttttgaccaagatggatgagtgggtagcagcctccctgagtgcacagcacccatttattactttcaggctttctctgctcagagctccaagccacccgcctcctgtgcctccgctctctgctggatccgagtcctaggccaccccttggtgaaggggtagtggagggagccggcatggtccaagaactggaccttaccctccaagccctggggctgcccagacctgcaccagggacccccgccagccagctgctgcaggagttgcatgctaaggtagagagtcagagtcccctcccgacctgggctaccccactttccttgtgggggtgggggtcctctctccacttctggaaggagtattccaaccactggcctgttttttctggagctgtgactggcattctcacatctgtggcctaggtcctcaggggtgtggggagctgagtttacagaggggcccatcctctctgccccagttggcctctgacttcttctcccatcagatctcagagctgcagccttctctgcccccagggtccctgcagcccctcctcagctgctcgctagatgcacccagatgggtaagactgtgtgcgactgactgaatgtgaactgtgtcctcatcagaggtggcagtgagagggacccctagcctgaccttgagaccttttctcccaggaagcgttggagtctctgtcccaaagcctcagagatcagtaccgctgccgccgctgcctcctcctcaagcgccttgacctcactacatctgctttccactggagtgaccgggcagaggtgtggtgggcaggggaccatgcagaattggagaggcccagttgtgggggctgcagttgcagggaggaggaatgagggccaggagtatcaccctcttgcaggttctcaggccatggacattttataattttttgaggtttggggctcctagaatctcagggtcccagggtattgttgaattcccagctctgagctggcagtatattcagaggcataccccatcattttttttttttttttgagacggggtctcactctgttgccaggctggagtgtggtggtgcgatctcagctcactgcaacctccgactcccgggttcaagtgattctcctgcctcagcctcctgagtagctgggattacgggcacatgccaccatgcccagctaatttttgtatttttagtagagacagggtttcaccatgttggctaggatggtctcgatctcctgaccttgtgatctgcctgtcttggcctcccaaagtgctaggattacaggcatgagccactgcacccagccttttttttttattttttattttttgagacggagttttgcttttgttggccacgctggagtgcaatggtgcgatcttggctcaccgcaacctccgcctcctgggttcaagtgattttcttgcctcagcctcccgagtagctgggatttcaggcatgcaccaccacgccgggctaattttgtattttttagtacagacagggtttctccatgttggttaggctggtctcaaactcccaacctcaggtgatctgcctgccttggccttccaaggttctgggattgcaggcatgagccaccacgcctggccaagtgtaccccatctttaagagatacgagcagagtcaggcacagtggctcatgcctgttatcccagcactttgggaggccaaggcaagaggatcacttgagctcagaagtttgagaccaccttgggcaacatagcaagacccccgtctctactaaaaattaaaaaaaaaaaaattagctgggcatggtggcgcatgcttgtccatctcagttactcaggaggctaaggtaggaggatcacttgagcccaggagattgaggctgcagtgagccaccatcacgccaccacactccaggctgggtgacagcgagaccctgtctcaaaaaataaatatttatttgagctgtgggcagtgaggtcttgaatggtaaagtaatgcttccaagatgacaggtcccacgtggggaagggctccagggtaccttctcttacctcctccccactccaggcccaaggagaggccatgagggcagtgctgatcccaattcgagaggttctgaccccagaatcggacatctccattgcacacgttctggctgcccgagccgacctgtcttgtctcgtcccagccaccagcgtggctgtccgcagagggacctgctgtgccatcaacaaggtgggcatctggggtagggaagggccctggcatccttggccttcagattggcctttcagcctctgctccagtccaagtttcagacttaccacctctaatccacccactagacatggcagctagaaggacctcgctcacacaaaaactgactgtggactccccagctcagaatgcttccgtggctccctaatgatctgaaaacaaagtctagctatttactgagtccctggctacttctccagcttgggcttaaaatccttccctatcaccaaacactacctatttgttgttttttaacctttttttttttcaagacagagtcttgctctgtcacccaggctgcaatgcagtggcttgatcttggctcactgcaacctccacctcccgggttcaagcgattctcctgcctcagcctaccgagtagctaggattacaggcacccaccaccatgtccggctaatttttgtatctttagtagtgacggggtttcaccatattggtcaggctggtcttgaactcctgaccttgtgatctacccgccgtggcctcctaaagtgctgggattacaggtgtgagaaaccgcacccttttaaccatttaaaaaaaaaaaacaaagacagaaataggccaggcacagtggctcacgcctgtaatcccagcactttgggaggccgaggcaggcggatcacgaggttaggagatcgagaccatcctggctaacacggtgaaaccccatctctactaaaaatacaaaaaaaaaattagccgggcgtggtggcagacacctgtagtcccagctactcaggaggctgaggcaggagaatggcgtgaacccaggaggcggagcttgcagtgagccaagatggcaccactgcactccagcctgggcgacagagcaagactctgtctcaaacaaacaaacaaacaaaaaacagaaataccctctgttttagtgattaggtatctagccgcatgcctctgtaagtagtcttatgtaaaatgagtattagggaataaagtctaacacagcaactattgaggcaaaatttaagttaagaaaaaaactgagcccgaggtgggtggatcacttgagcccaggagcagaggttgcagtgagccgggttctcgccactgagctccagcctgggcgacagagcctaggcgactctgtctcaaaaaaaaaaaaagaaaagaaaagtaggctgggtgcagtggctcacgcttgtaatcccagcactttgggaggccaaggtgggcggatcacaaggtcaagagatcgagaccatcctggctaacacggtgaaaccctgtctctactaaaaatataaaaaattagccaggcgtggtggcacgcacctgtagtcccagctacttgggaggctgaggcaggagaatctcttgaacccggtaggtggaggttgcagtgagctgagatcacaccactgcactccagcctgggcaacagagtgagactccgtctcaaaaaaaagaaaagaaaaaagaaagctcatgctagtatcttccaccagttcagtcccccctcccccagccactgtactcaaatagtcaacatctgctgtttcttcttcagcctcatgctgttcccttcgctctctggcccccttgtccaagatactttttttctctgcaactcaaatctcataaactctcaggtgcttatgggcaacgttccagaccgggggggccgcccaaatgagctggagcctcccatgcccacctggaggagccgaagagaggatggaggcccccagtgttggggtcgcaagaagaagaagaagaagtaaagggggactggtggtcgggggcggggggtcctccatgagatgctaatgctatcggtaatctctggggagtccgtttaaggctttccttggtatttggcacccaagccccccatctcctattcctgagtccccaaatgccctgctcccattcacgtcaataccaagaaccatgttctccagagaataaatttaatttatgacagctgtaggacctctctctgtgggggccaagtcaggggtgttggggtttgtgaaggggttgggggggtctctgctccctgggactgaatgggcccctgctgctcgaccctcaaagttctttgccctatagcacatctatcctgtgccgtgggcatgggtaaggagacattcaggcatcagacaagcatctgtcaggcgcctaccacctgccagccctgttctaggcactggggatgcagcagtgaatgacattgatagaaatccctgttctcctggagttgatgctcctgttgaggaaagacagacgttcaacgagataaagagggaaaaagtataggctgtcagagggagcacattctatgcagaaaaacaggagctgggcgtggtggctcacgcctgtattcccagcactttgggaggctgaggctggtggatcatgaggtcaggagtttgagaccatcttggccaacatggggaaaccccgtctctactaaaaatacaaaaattagccgggcatggtggcgcgtgcctgtaatcccagctacttgggaggctgaggcagaagaatcacttgaacccaggaggcggaagttgcagtgagctgagattgcatcattgcactccagcctgggtgacagagcaagactctgtctcaaaaaaaaaaagaaatggagatgtagggagttggtagaatgaggcctgagtctaaatgtatccaacacacagccgcacagatactaagtgcagggaaagggagcaggattagcatccaccaggatgcaaaagaggaaagtcacttccagggaaaaagatgacggacgtaccactaaaggcagtgtggatgggaaggcggatgcctctggaggcctacctctgggagccctgccagagtctgacggcaggactcaggactgactgggggaagggagtgaggaagagaggagaccaagagatgtctaggaatccagcttggaggatgcagttgatggtgggtccatcaccgggcaggggacctggaaggaggaagggaggaagaaagatgacagatgatgtggggagcatatgatgtctaggagacgcttcactgccaggaacacttccctgcccagactggtaagtggatgaatgaacgtcccctgtggaatcctttttgtaacccaatctgagagtctctgccctcaaatagtggcgtttactccattaacccgtacagtagctcctgatatatttggccttattcttgctatcttattggctagaatccttttttctgttctcctagtggttattgtccccaccctacccccaacatgttgaaacttctatttttcttttttttttttttttgagacagggtcttgctctgtcacctaggctggtgtgcagtggcacaatctcagctcactacagcctctgcctcccgggctcaagtgattctcctgcctcagcctcccgtgtagctgggactacaggcacccgccatcacacttggctaatttttgtatttttagtagagatagggttttatcacgttggccaggctgatctcgaacttctgacctcaagtgatcctcccacctcagcctccccgaagtcctgggattacaagcatgagccaccacacccagcctatttttctatcaatattaaaaagtaaccagtatccataccctcctaccccagcagtcaaggacttctgcatatttgtactttctatgggtctccaaatctgtccagtcttccccacgccaatggcctgtgtcccctgtatccacttgggggtaggggcggtttctcctcaccgtatctgtttcccaggaagggtgtggggattcagtctgggtccaggcatggcgaagctggcacccagtctcaggctccagggatagcgtgtaggagtgattttcctcggagcctgtttgtgggtggatggaagggatgtgggtctgatgggaaggacctcttcttgaccttggactcaacccctttcccccaggccccttcccagcaccggtgtgctctaggtcttaccacagctggcatggggagctggtgtggatgggacaggagctccggggggtcctgcatcgcccttggcccctggcctcttcttacattctaccttcacctggtctctgcagtgtttgtggcaacacagcccgcactctgggggaaggcagcggcaggggtccgatctgtgtcatccattcttccagcctgcgggccaaggcttccctcccactcactgacaccccactcaccccgacagcggtagccttgcttggtgacaccccagagctgggaagagaaaggagaaaaggttacccatcctaggagagggagggctgtggattggcagggcagctggggagtggaagtgtggaagctacccaggttttgaaattctcaaggctagagatttaactggaattaaaggaatgtgggtggggtacagtggctcatgccagtaatcccagcactttgagacgccaaggtgggaggttgggaggccaaggtgggaggatcgcttgagctcaggattggaggctgcaatgaaccatgatcgtaccacggcactccagcctgggtaatagagcaagacccatctcttaacaaaataaataaaggaaacttggagattatctcaagtttagataatcacctcagatattagatttaggtaaaatttagagttactaaaatgcaaattctatgggcaagagttgtctgctgtattcctgctgtaaccccagggcctaggattacctggcacacaggaggtgctcagtaaatatttcatgaatgaataaatgaatgtgggaagtaatccaaggtttgtgaattagtctcgggttataggttgagagattgatccactagccagagtttgaggatctcttgaatttggaagttattcagagtttgaatgatctggagtctagagatttggaggatgattctgtttgaacataatctacccggtttggagattatccaggtttgttgttgttgttgttgttgttgttgttgttgttgttgttgttgttgtttttgagacagaatctcgctctgtcacccaagctggagtgcagtgctgcgatcttggctcatgcaacctccacctcctgggttcaagcaattctcgtgcctcagcctcctgagtagctgggatcacaggtatgcaccaccacatgcagctaatttttgtatttttagtagagacggggtctctcttgctatgttccctaggctggtcttgaactcttgagctcaagcaatccgcccacctcagcctccccaagtgctgggattacaggcgtgagccaccactcctggcctcctatctagagttttaggtattatccatggttcagcaattgtctggggtggacattatctgggattttgggattatctggcatttggagattatccaggatatagggaatgtctggtgtttagggtttatatgaaacaggatgatttgaagctggaggatttctggaatttgggggttatctggggtttgcggactgccggcttcaggacagatggaacctaagggtggtgatggggtggggtgctcacgaagccactgcagctgtcgcagaaggtaggctttcggaaggtgacctcatggaaggtgtgcaggaaggccaggcccaacttggagcagatggcgctggcccggagcaggtaccctgtcagctcctctctgctgaaggatcctctcctgggggcagaaactgagcctcagcatgacctgccccaacgtcctccagacccaggagtccaggcaaccccagtgtcctcatcttcggaggatccaggagtcacaaccacttacccctggcgtgggggtgggtgaagcccatggcaggcgaagggaaaattgcccgagagtcgctcaaagtcctcctgagagattgttcctcggccttcagggtcataattcttgaacacagacttcagaggagtgtggggaagcagataaggcccagttgtcgaaatatgatccccatggccataagtccccacctccaggctcagggttctacagatgtcttccctcctggctgctggcggccgggccaccctcccctccttacctccaccagctgctccacatgccgacccagtgtgaccctgtccggcttgggtgtcacaccaggggcccactccaccaccagaggtgcattgaagggggagggtggctggggcggggacagaggagcacagttagtcactgcataggcttagggggggttcgaggtaattgggggagtccgaggccaggggttgggtctcaccaggctcttgggacaacgcggctcccgggcataagaaagctcatagatctcgtcttccgtgtagaagaggtccagggagagctggagcagacaggggtgttacggatcctcccatctatagccctgccccagacccccacacccactcgcaggctcttcccaaagcccctcctgggttcaaatcctggcattactgctgtgggacagtgggcaagggacctcacctctctgggcctcagtttcccaatctacagaatgggcacagtaagggtcccgacctcatagggttgtaaggtggaatgaggtacctggcacacagtcaatgatcaataactgttagtagccttttgcttagattcttggatatgtcaaagcttgagattttgggctatcagcatgagaagctcagaaccttggagtttaagaatgtgaaccccaaagcaattccagagctcagatcaatggatacttgagtcattggaggaagtggggaaaaaacatgttacttaaatagaatacagagctcactctgctccatatactgtcgttttttgagacagagtcttgctctgtcacccaggctggagtgtagtggtacgatcttggctcactgcaacctccgcctcccaggttcaagcgattctcatgcctcagcctcccaagtagctgggattacaggcgtgtgccactatgccaggctaattttttgtatttttagtagagatggggtttcaccatgttgcctaggctggtctcaaactcctcaggcaatccgcctacctcagcctcccaaagtgctaggattagaggcatgagccactgcgcccggctagacactgtcttaaagacattctttgaacgatgtcattggctgtctctcctcaaccaccctctgaagtgggtccttttattttattttatttttatttatttatttattttgagaaggagtttcgctcttcttgcccaggctggggtgcaatggcgcaatggcgcaatctcagctcactgcaacctccacctcccgggttcaagcaattctcctgcctcagcctcccaagtagctgggattacaggcacgcaccaccactcctggctaattttgtatttttagtagagacggggtttctccatgttggtcaggctggtctcgaactcctgacctcaggtgatctgcccacctcagcgtcccaaagtgttgggatcacaggcgtgagccactgcgcccggctgggtccttttattattcccattttgtggataaggaaactgaggcttaagggttcagtgacttgcccaagatcacgcagctagaaaaaaacctagaagttctggcttcaaaacccatgcactccagcacttttctatcctggtcctggagacactcacacacccaggaccctatatctcagtacccttggaagcccagcctgggcggggccaggggggctcaccgtgagcaggtgcagcagatcctcattggcgctgcagggtggatgctgcccttggagggccaccagctcctgcagccgcaggtagaggttgttcagcttgggtaggtgcaggcggccgtcaggcaacctgtcgggctgtgcctcatgcagggacaccaggtccttgaggtgcacgcccagtacaggcagccggaaacccgcgcagccagcccaggtgcggcggtagcgggcgtagttgttgtgggaggcaaggagctcagtgagctccaggagggcctggggaggagggacatgggattggggcgttatcaggacagtcccatcccctgagcagcctcctgtgtgggctctaggccttcagggacccagtggcattgtggaaacctctggagcccttccatatcccatgccggtctcagcatctcccccaaactgctcttcctcttgggtccccatctcagagaagttccacaatcccccattctttggctaaaatgatttcttttatctttctttctttttgatttttttttttttttttttgagatggagttttgctgtcttgcccaggctagagtgcagtggcgtgatctcggcttactgccacctccacctcctgggttcaagcgattctcctgcctcagcctcccaagaagctgggattacaggcattgagccaccacgccaggctaattttgtatttttagtagagacagggttttaccatgttggccaggctggtctcaaactcctcacctcaggtgatctgcctgcctcggcctcccaaagtgttgggattacaggcgttagccatcaagaccggcctttttatttatttattttttaggctagggtctcactctgtcacccaggctggagtacagtgtcatgatcacagctcattgcagccttaaactcctgagcttgatggctgggcacggtggctcacacctgtaatcccagcattttgagaggccgaggcaggcggatcatctgaggtcaggagttcgagaacagcctgggcaacatggtaaaaacctgtctctactaaaaatacaaaaattaactgggtctggtggtgcaggcctgtaatcccagctactcgggagtctgaggcaggcgaatcgcttgaacctgggaggtggaggcttcagtgagccaagatttcgacactgtactccagcctgggagatagagtgagactctgtctcaaaaaacaacaatgaaaaggctgagggggaggctccagcagtcctccccctcagcctcccaagtagctgggactacaggcatgggccaccatccctggctaatttatttttaaattttttttcagccaggcgcggaggctcacacctgtaatcccagcacttttggaggccaaggtgggtggatcgccttaggtcaggagtttgagaccagcctggccaacatggtaaaaccctgtctctactaaaaatacaaaattagcagggcatggtggtgcacccctgtaatcccagctattcgggaggctggggcaggagaattacctgaatccgggaggcagaggttgcagtgagccgagattgcaccactgcactccagcctgggcgacaagagcgagactctgtctcaaaaaaaaaaaaaaaaaaaaaaaaaaatttctggagatggggtctcgctatgttgcccaggctggtctgaaacacctgggctaaagtgatcctccaatcttggcctcccaaaacgctgggattacaagtgtgagccacactgtacccagcctataattatttcttaaaaacccagattttatcaagggtgtgtcatcactctcaaaacttccctagcttagcccatcttacaaggcgctataggatcttcccagggcatcttcggcttaatttcctgccactttctgacctcagccagtcctccccatggggactgcaaagttctctgctagcctgtctcccatctgtctccctcacagtccagctccggaccagacacactgaaagcagagagggatcagcaccatgagtggatggatgacagggaggaggaatgctggcagagcctgggggtctgggatttggaggagcaaggacttcatgtggtaccaggacccctgggcaggaatggacagggcttggggaattaggtgtgggggctcaagacagctgaccacttggagctttggggagggtagtgggattcaccttggtgctgtcagggctcaggtgggcatgggagtccttgagtctggagatggcactgtgacacaggccccctgtgactgccatcagcgtgttgaaattctgcagctggtggagcctctaggaagagaagcatgcacacagggccgtcacgggagggagggcaagtcaggagttcagatgacagcatcccagttgaggtggggtcccaggcatgtgtggaccaatgtggggatcagacaggtgagagaaggcgggtgtgtgcggcaagagtgggacatgccatgtgtgggcctcacaggggtgtcagatggctatctgagccgggagggtcaagcaagtgattgactgatacgaggttagaaaatctggggagacaggaagtacgagaagttgggcggatttggggaatagacaggtgtgtgtcaggtggaggaggcttcagacatgtcagggtgtcagccatctgggggtctgactgctctgagagtcacacaggtgcggggaggcaagaaggtgcaggctctgggcaggagctgggagccaggcagaggtgaatagggccagagagatatggaggagtcagacagatgctagacaggtgtggggccaccagggcagctggggaattcccttgccctccttttgacaaatttcggcagaggttgctgtggagagagtggggccagggaggaatggaaaatgctcagactaaggacaccccaggcggacgtcgagacccccaggtctcaggggccctgcaggagtaagcaagccagggaagacaccagaggaagggcgtggtctgcgtggaaatacgcaagggggcgcggccacagcggggccgtagggcttcccttttccccagaagggcgagaaggtgtccggaaaggagggggaagggaggggaagagaagggcgtaacacaatggggcggggcggggagagcccggacgcaatggggagcgatgcacaatcccgaagcgaccgctggggcctggggactggggattgaagcctcgggcttccatgccccacaaaggtgggggcatggaagagacactctcattgacctggggatagaatattcgggcatagggcttgggagcctgtcacgtctagggccaaggggtggggccacggtgggtgcgacgcggtgacatcaaggccaaagaagaagttacggtccttggttggaatgcccaggctgtggcctcgggggcggggccgggagatgcgtgacgtcaccgccgggatgaccctgtggggtcgagggtctggaaggggaaggaccaggtggctgcgtgcagtggagttcgcagccccaaggggcgggcctcacctgtgccacgtgaatgaacttgtccagcacctgtgcacgctgtaggggcccgggacggctcagcaccatcacctgcacccagcgggacacgctgttgctgagacctacggagccctccagggccgggcagcctcgtactgagccctgcaaaacgtagctccgcaggtcctggggctgggagcgaggtgggtgtcaaggtgggccgtggcgctcaggccctgcccttccatggcatccaactagcagtcacgatctctgatgtcctagcctggtctagccggagtgacctttgtcatctgtcccccaaccctcaggctgctacatgtccttaacgtcaccatgctcctctcccatctgaggaggcatgtttcaatatagccaggcactatatttgacaagtaatcatattaaataatttaatcctcataactctatgaggtgagtatcattccattttagaggtgagacagttgaggcacatagaggataggtaatttgcccagggtcacacaggtgtgagtcagggtgggcgtctatatgctcttaactgtacacctgactggtatacagtaagcaaagggaaggctggggaagatgaattgaaatcaacctctatctgttctgcccaaggagtgttcatttcatacccacatccactacactgagtatatttgcatacacactcacacacacaacacacacatacaatcgggacagtttcacatgaaggaaacagatccccaccttcccttgaaatgatgatgtccagatggcaaaagctaatgcatatatatgttgaagcacatgaaactgatccttgggtaggtaatatatgacaatttcaaatggttcaagcagatagcatttaccctggaccaggcactgttcctgcaaggcaggaactgtgcatatcccctttttacagatgaggaaactgaggcaccatgaatttaaatgcttgttgaataaatgataaaatattttgagcacttactaagtgccagtcgctgcaataagccttttatttatttattttacttttttgttgttgttgtttttcgagacagaatctcgctctgtcgcccaggctggagtgcagtggtgtgatctcagctcactgtaatctccgcctcctgaggttcaagtgattctcctgcctcaccctcccaagtagctgggattacaggcatgcaccaccacacctggataatttttgtatttttagtagagatggggtttcaccatgttggccaggctggtctcaaactcctgacctcaggcgatctgcctgccttggcctctttaactcattttcctggaccttctagcatacaggtttgagtttaagactttgagatctctgccgaatgaccatgcaggtgtcctctcagtcctaccttcccccagccaatccctcccctaccccagtgtctcccctgcttgggacggggatgggagggggtcctcaccgtgatagcctggaaggaccggaactccaggtaggtgaggtgctgagccagctcccccgtctccaagtggtcgaaaagcaaggacactttgcgctttttgcccaggcctgggctgctcattgggagtggggggccagggccaccagggctcaggctgggggccaagaggggcagggtattggagtggctcacagttgagggcttggggatatagagggagatggcagaatggcgatggggcagggaagaggggagcacagggctgactcacaggtcagaagagtctcccagtcttctctgggctgagttgccctcccgggccacggtggcccagaaacgacctatgacttcttctagctggggatcctggtgcatcacctcagggtgtcgcatcagccagtacctgagagtggtttggagatggtgagatgaggccgggggtggcgaaggtctctacaaggggtattttgggctgaggaatttctaggtgctgagctagggggtctctaaatgtgtgtgggggtccctggagggttggggtttggaggggcaccaggcttggagaatctctggagtaggatgggggtctcttaacagagactggggggatctgtgggaaacagaccggggagtcacttggaagtgggattattgggaagcaagatcgtggagcgtcctaggaactagactgggggcttccgggggtgaaatttttggagggacagaatgagggggtcttatgggctaggctggggtctgtgggaggtagagattttggggatcagagttggaggtctctgggcaccagctaggagggtctatgggatctggttggtgaggggggtctctaggaagtgggggttctaaggaacggaactaagagggtcttaggaaccaagctacaggtgtctcagaagtgggattttggcctgtggggctggttgggtctgtgggaactggcctggggattctctgaggaatgttttttgagggggaagcaggatggaagtcgtgggtcctgagagtggggatctcggcccagccctacctgaccaggtgacagatctgcagccgtctcagctcctgggtgtcccctgtggccttctggtatttgagttctggtcaaggctctgttttccaggatccatgacctgcctgctccccattcccattgcccaggttctcacgactctgccctctgccctccacccatagctcacagtcctggaggatatgaggtcagcaggcgggcagccaggtcggcggacggcagcacccagctgtgcatggccagcaccatgttgagcatgtggtcctcgtggcacaggctgccagctgaatctggggtggaaggaggggtactctgtgacagaatggccctcaagcaatgcagagcgtagctccagatcctgccggaccacctggttcaaagaccagctctaacggtgatccccagcatgaccttggacaggcaacctaacctcctgtgcctcagtttccttatctgtattgtgcatggggcagcatcacccctggcaagtcttgctgaagattgaaatagcaccagactggccgggcacagtggctcacacctgtaatcccagcactttgggaggctgaatcgggcggatcatatgaggccaggagttcgggacaagtctggccaacatggtgaaacaccgtttctactaaaaacacaaaaattagctgggcctggtggcatgtgcctgtaatcctagctactcgggaagctgaggcaggagaatctcttgaacccaggaggtgggggttgcagtgagctgagatcaggccactgcactccagcctgggtaacagagcgagactctgtctcaaaagaaaaagaaaagaaaagaaaaaagatttatataaatatatataatatacacatatattatatatatatataaatgtatatatttccatttcaggaaagaagaaatgcaggtgtttctgttatctctaatgtagtgattgagtttcattccacccagccctgttctcattttacctccaaaaactgaggtggagagaagcgagtgctgagcccgaggttagggccagggaggctgctggggagaggacacttaccgaaggactggatgcatttctccagcagctcatcttcgctgcagccgccctcactcagcaggcccaggttcatggaagccatgaccttgctgatttcccgagggctggggcatgtcttgtggcggcgcacttggcggggccggcctcgccctcctatttttccggtgcattcctggtgggacttcctgtgggcacagcccccaaggagtcatgggagcaccttctttcggacagaccctagaattccttttgactctaatgccccaaggcaccacgggagaggcttcctaaaggcaaagccccagggttacccctgacctaccagggactctagagagaatccccaggaatattccagatccctgggggaatcatgggagccctctcccacaagcaaactcccagggatattcctgctcccttcagggaatcagagaggaagatcctcaagaccaggggtccccagcccctgggacacagacaggtaccagtccgtggcctgttaggaaccagcgggcaagcaagcacccccgcctgagctccacctcctgtcagatcagctggggcattagactctcttaggagcatgaaccctattgtgaacttcacatgcgagggatctaggctgcgtgctgtttatgatgcctgatgatctaggctgcgtgctgtttatgatgcctgatgcctaatgcctgatgatctgtcactgtctctcatcacccccagatgggagcatccagttgcaggaaaacaagctcagggctcccactgattctccattatggtgagctgcgtaactatttcattatatattacaatgtaataataataaaaataaagcacaggatacatgtaattaacttgaatcatccccacaccatccccacccccttccacaaaactggtccctgatgccaaaaagcctggggaccgccgctcaggactgctctgaatctcccagggaatcacagtagaagacccctgggaccactcaagacccctcagggaatcataagaactccttccccaggcattgcccccaacttcctcttgactgcttccagggcatcctggaagagacttccttttggcagatcccaggattactcctggcctaccagggactcgggagaagacccctggaatctcttctgtcctccccaggcagaggcatgggaggacctgccttcaggaattgcctcctcagggctcccgtttggtctctaacaccctcccctccttcctcccacagccctcaagagagcaaggctcttggaccagtgtgatggctcacgcctgtaatcccaaagctttgggaggccaaggtgggtggatcacttgaggccaggagttcgagaccaccccggccaacatggtgaaacccccatcgctactaaaaatgcaaaaattggtcaggcgtgatggcgggcgcctgtaatcccagctactcaggaggctgaggcaggagggtcgcttgaacccaggaggtggaggctgcagtgagccggaactgcatcactgtgctccaacctgggtgacagagtgatttctgtttcaaaaataataataaaaaaattaaaaagagaggccagtcacagtggctcacgcctgtagtcccagcactttgggaggctgaggtgggtggatcacttgaggtcaggagttcgagaccagcctggccaacatggtgaaaccccatctctattaaaaatacaaaaattagccaggcgtggtggtgggctcctgtaatcccagctactcaggaggctgaggcagaagacttgcttgaacccaggaggcggaggttgcagtgagccgagatcgtgccactgcactccagcctgggcaacagagcgagtcttagtctcaaaataataataataataatagtaataatagtaataataattctccctctgcctggtgcctcccagaggctgctgttcctgataggggaagagggtaatggagagacaaggatggtgggagcagggaggctgctgaatccaagcttcagacgaaagtagaatccagaaatttttgccagctgttgtgacttcgtgttagtcacttaatttctctggggctcaatttcctcgaaggaaaaatgaggatagtccttggaccttctccagggatttcttttttctttctttctttctttttttggagacagggtctcactctgtcacccaggctggagtgcagtggtgcgatctcagctcactgcaacctccacctcccgggttcaagcaattctcctgcctcagcctcccaagtagttgggactacaggcacgtgccaccacgccgagctaatttttgtatttttagtagaaatggggtttcaccatgttggccaggctggtttcaaactcctgggcccaactgatcctcccacctttgcctctgaaagtgctgggattacaggtgtgagccatcacgccaggctcccacctctaccctttttcagacagggtcttgctctgtctcccaggctggagcacagttgtgcaatcaaagctcattgtaaccttgaactcctggactcgagtgatcctcctgccttagtctcccaggtagctgggactacaggtgtgcacgaccatacccagctaattttgtgtgtgtgtttgggtgtgtgtcaatgggggggggggtctcactatatttctcaggctggtctagaactcctggcttcaagttctccttgtcttatcctcccaaagtgctgggattagaggcatgagccatcgttactagaagggacattttaaagtattatatatgtcctaggctaaggaaggagcattctaactaagtcagcatttccctaagtgtgggcacccagctagtaccaaaagcatcacctgggaactggatatcaatacagattctcaggtcccaacccagacctacaaaatcaaacactttaaggctaagggtggtggctcatgcctctaatcccagcactttgggaggccgaggtgggtggatcacgaggtcaagagatcgagaccatcctgcccaacatggtgaaaccccatctctactaaaaatacaaaaaagtagctgggtgtggtggtgcacacctgtagtcccagctacttgggaggctgaggcaggatgatcgcttgaacccgggaggcagaggttgcagtgagccaagattgtgccactgcactccagcctggcggcagagcgagactccgtctcaaaaaaaaaaaacaaaaaaaaaaaaaccaaacactttaaaggtaagcccagcaacctgtattttacaagccctccagacagttctgaggctcgctccagtttgagaaccactggtctagagtgtctcattgagtacttacaggcctctccgaggtagaggatatgattgttctactgacagaagaaaaacccgagacacagagcagttaagtgacttacctaaggtcacacagctaggaaattaggcagccaggagtctaccactaaactgctgggtggggaggaaagccctttgcccatcagagtggtgctgggggtggcaggaggagttacccaggctagggagccacccaccatctgcctctgtggggacagaagggccagcttgcccaggagatgaagcccattccagaaccggccgcacagccagccactaggccctgtcctgcagccccctgtaggggtctggaacagccaggagtggtttaagaggcaggggagtcgccttgccctgtgccacactcccctctcctgggccaggccctgcaggagcctggagtttccagtccacggggatggggaaccaggaagcccccagggagggcagagacactcagcccaggccagggatggaggtggggtgatgaggagtggaaaaggggcacggagcagctcaaactccagggacaacacggtacagatgccacatacaagcgactgcagccgtagctggctccagactccctgaagcatccacctggcccccctgcgcctgatcccaaagaagtcaggaatcctgccaccctggcgagtgatctccccagccctcccatgcagagggaggcctcagggtgctgccgggctccctggggagggtcctctcacctcttactgtcttttctgttcatgcttcccgcgtggggtgaggaggccgggggtcttgcaagagtagggctcagctcctccccttgcccaggactccagcttctcagcccctagggagctggggcctcctcggtgcttgggaaggaaagaggaactgcccctccccacccaccctcaggccagggggaaggaagaggctggggagagaccgaaggcccccctcccccacacggggatcccttctgctgaggtttccggcatcgctggctctcccaccctcaagctccccggcgggctctctatctcccccatctttcggtgtcgagacccgtcactgtcatacttcaataaaagaaggggcttttctttttaaagcatgactgatatttatgtaaaaacacacacactcactcaaaaagataagtctgtctgtctagaaggacatattcatatatataattcatgaaggtttgaatggaaactcacaagacatagtattttgtatatttcttcataggcgtctcttattcctagtttaagtgataccatttgtaccctggaaaacattttcactttctgactttattgtaacaaacctccacatagcacctactgtgtaccacacactgctgtaaggactttaaaaatattaactcatttaatcctcacacaatccactgttaccttaaaaaaaattacataccggaccaggcacgggggctcacaggggctcacgcctgtcatccagcactttgggaggccaaggcaggcggatcgcttgagtctaagagtttgagaccagcttgaacaacgtgacaaaaccccgtctctacaaaaaatgtaaaacgttaggccggtgtggtggctcactcctgcaatcccagcactttgggaggccgaggtgggcggatcacctgaggttgggagtttaagaccagcctgagcaacatggagaaaccccgtctctactaaaaatacaaaattagccaggcgttgtggcacatgcctgtaatcccagctactcggcaggctgaggcaggagaattgcttgaacccaggaggcggaggttgccgtgagccgagatcgcgccattgcactccagcctgggcaacaggagcgaaactctgtctcaaaaaaaaaaagttagctgagcgtagtgatgcacacttgtagtcccagctactcaggaggctgaggctagaagattgcttgagcccaaggaggtcgaggctgcagtgaaccatgatggtgccactgcacttcagtctgcgtggcagagccagaccctgtctcaaaaaacaaaaaacaaaaaaaaaaaacacacacacacatcaaaaaacattagagatggaggtaaagccttggggaagcccctccccatcccctgcctttcttaagcagggtgtgaccaatatgacacgttgtcgagtttcgtccaaactgctgtctgtgcgtttaagcacatcatataaacatgtgctcctagaaacagacttttcttttgagtgtgcatttttttctttttacctaaatgtgtcatgctcgacacttttttttaaattgaagtacaaaaaagatcacgaatcattaagtatttaggttgatgaaatgtcaccaactgagcaaacctgtgtgacattcatacaaatccagacacagaacattctcaccctccacaagccccctgtctttcttcccagcacgaattcccacagatccccactcgcccgaagtctggcgcagtagttttgtcttgttttgagctggataaaaatggactcctgtattgaatctgggttctttctctccacgtcttgtctttgcagttcttccatgttatcatatttggttataatttattcctttttttggccgggcgcggtggctcacgcctgtaatcccagcactttgggaggctgagatgggcagatcacttgaggtcaggagttcgagacccgtctggccaacatggtgaaactcccatctctactacaaatacaaaaatgagccaggtgtggtggtgcgtgcctgtaatcccagctacttgggaggctgaggcaggagaatcgcttgaacccgggaggaggaggttgtagcgagccgagattgcaccactgcacttcagcttgggcgacagagcgagactctgtctcaaaataataataataataataataataataattccatatagtctttcattatgtgacaattccatgacttatatatatatatttatttatttagagataggtgttgtggatagtgactaagcgggctggtggcatgctaacttctattttttttttttatttttgagacagagtcctgctctgtcgcccagtctggagtgcagtggcgtgatctcagctcactgcaacctctgcgattgaagcgattctcctgcctcagcctccccagtatctgggatcacaggtgtgtgccaccacacccagctaatttttgtagagacggggttttgccatattggccaggctggtcttgaactcctggtctcaaataatccacccgcctcagcctcccaaagtgctggggttacaggcgtgagtcacagcactaagttctatttttcatcagtctagagtctggtaataactagacactaaaacattttaagttaagtgagttatctatacaagaggactatatgtcctagactgtaaaaaaaagacaaacttatagcttctctgttttttttttttatttttatttggtcctaccaacctgactcttttttcttaattaagactccacagcagggtctccctctgtcaccaaggttggagtgcagtggcgagatcctagctcactgcggcctcggactcctgggcttaagccatcttcccacctcagcctcctgagtggctaggactacaagtgcacaccactgtgctctgctaattttttttttattattttcctgtagaaacagggtcttactttgttgcctaggctgatctcgaactcctaggctcaagcaatcgtccttcctatgcctccaaattgctgactctccaggcgtgaaccactgtccccggcctccgtgatttattgatcaattttcctgtgatggacatctgagttgtttccaggttggggctgctgtgactatttgagcatctgacttttgatgaacatagagtgtaccatattgtagggcagtacccaggagtggaataaatgggtcatagtagttactgtgattctaccaaacatagcatgttagcaattcattgaaatcgttctctcagaagtatatttttccactttttttttcactaaaagaaagaaccgtggatgtatattttttccaatgcagaacatttagacagtcactgaactcgccgtctttagtttttccatcacgcgatgttaccatagcttcagactctctcttcctgcccgttttcaccctctctccccctggcctcatggtgttctgtctgactctctcagaccatctcctgtagcacctgcatcttgaatgtgacttaacaatcctggctgagcagagacttcgtagtgtggcagtgtctccaggccctggggacccagaaaagcctcaaggaggaggtcagaaatcctggcacttgtttctactgtacacaggcagccttagtcctcgggctggccaagaatacccacaatacccgtgctgatgactacaaaggaagggacttctgaatcaaaccacagaaactcctaaggcagaaaaatgatggacatgataacatgcaaatacagactttcttcttttgttgctgttcttctttctttctcttttaaattttaaagatggggtcttgctatgttgcccaggctggtctcaaactcctgggctcaagggatcctttcacctagacctcccaaagtgctgagattacaggcagattttcttttaacgaagacaccatgggacaaatgtcagatgacagaaggggaaaaggtgtttgcaatatttaaaaatcaatgagatattaatatctagaatataggtcaggtgcagtagctcatgcctctaatcccagcactttgagaggctgaggcgggcagatcacttgagatcaggagttcgaggccaacctggccaacgtggcaaaaccccgtctctattaaaaatacaaaaattagcagggtgtggtagtgggtattgctctgtcatcccggctacttgggaggctgaggcatgagaatcagttgaacccaggaggtggaggttgcagtgagctgggattgagccactgcactccagcctgggagacagaatgggactccatctaaaaaaaaaaaaaaaaaaaaagaatataaaaggaacagctgcaaatcagcaagcgaaaaagacagcaaccataatagaaaaatggccgggctcagtggctcctgcgcctataatgtaagattacatgcttgtaatctcagcactttgggagaccgaggtgggtagactacctgaggtcaagagttcaagaccaccctggccaacatggcgaaaccccgtctctactcaaaatacaaaaattaggctgggcacagtggctcacgcctgcaatcctagcactttgggaggccaaggcaggcggattggctgagctcaggagttcgagaccagcctgggcaacacagtgaaacccgatctctactaaaatacaaaagaaattagccaggtgtggcagtatgcgcctgtagtcctgggggtgctgaggcaggagaattgcttgaacccaggaggcggaggttgcagtgagccgagatggtgccactgaactccagcctgggcgacagagcaagactctgtctcaaaaaaaaaaaacaaaaaaaagtgagcagggatcacaatgagcagataacaaagaaacccaaaactctgataggcacttgagaagatgctagaaattgttggtaactcatcagggaagtggaaattaaaatgacagcgagtccaggcgcggtggctcttgcctgtaatcctaacactttgggaagctgaggtaggaggatcacttgagaccagcagttcaataccagcctgggcaatatagtaagaccccacctctataaaaaatttaaaagttagttgggcgtggtggcacaagcctgttgtcccagctgctcgggaggttgaggtgggaggatcccttgagcccaggagttccgggcagcagtgaaccataattgcgccactgcaccccagcctgggcaacaaagtgagatctcatctctaaaaataaaatagagaaaataaattaaaaaacagtgagtcaccctatataaatctggcaaaaattagttaagttggaaatgccacatgagggttggggatatggggacccggggaccctcatgcactggtagtgagtagccattccgagggctacccagcactacttacacaaatggtgcgcatggatatgtcacccagcaattagcttctgggtacgcacaataaaacattctccctcagcttcctgggggaccaatacacagatgttccctccagcattatttcgggagagctggaggcagcctgggtgtccgctcccagtaggggtaggtggaaaaacagaagggatcagtcaccagagaatcctgcaaagccaccactgtcacacaccaggtgtccacagagcaacaagggtaggtcttaaaacacataatgatgactgacaaaaataagaaacactattaatatcttatgatataatgctcaatgacacagaatcattttacatttacataaagttttagggaaaaacaatatttaatatacaactatgcgttggataatgtataacagatacaacatagaattgtattgtactgtataattatattagcctaaatatataattatataattatacattatataatgccaaattatataattccataatatgacacaaacttttgtgctatttattgcagttgtgttaacatcagtatttaattatggaacacctagaaacctgctataccttgaagaacggtttctatgtaattttgtttaactatgggatattgttttatataacttactgtataccactacatgttaataaaaaaaatttttttttttttttttgaggtggagccttgctctgtcacctgggctggagtgtagtggtacaatctcggctcactacaacctctgcctcctgggcttaaatgattcttgttcctcagcctcccaagtagctgggattagagtcgtgtgacaccatgcccagctaatttctgtgtttttagtagagtcagagtttcaccatgttgaccaagctggtctcaaattcctggcttcaagtgatctgtctgccttggcctcccaacgtgctgggattacaggcatgagccactgtgtctggcctagtaataattttaatagggctggacgtggtggtttacacctgtaatcccagcactttgggaggctgaggtgggcgaatcatgaggtcaggagttcgagaccagcctggccaacatggtgaaaccccgtctctaccaaaaatacaaaaattagccgggtgtgttggcaggtgcctgtaatcccagctactcaggaggctgaggaggagaatcgtttgaacctgggaggtggaggttgcagtgagtcaagatcttgccactgcactccagtctgggcaacaagagcaagagtccgtctcaaaataaataaataaataaataaataataataatagcaacacttacattacattaaccaggcactggcactgttttaagttttatctcatttaattaattatctcatttaactctcccaacaaccacgtgaggtcggtactattaatattccccttactggatggggaaaccgaggcacagagaagctaagtggcttatccatgtaactcaaggaagtggcaaggctgggtgggattcagatccagattatctggcttggagtcggagtccttgttcttttttttttttttttcagacgaagtctcgcccaggctggagtgcagtggctcaatctcggctcactgcagcttctgcctcccgaattcaaggagttcaagcaattctcctgcctcagtttcccaagtggctgggattacaagcatgtgtcaccacgcctggctaatttttgtacttttagtagagacgggggtttcaccatgttggccaggctggcctcgaactcctgacctcaagtgatccacccacctcggcgtcccaaagtgctgagattacaggggtgagccaccactcccggccggagtccttgttcttaatcactatgtttggtgctttttaaagtcaggagatctggtgcacatccctgctctgctgcgtgatatcttgcaagaacttccccactcagagcctcagtctgccctctgtgaaatgggagaatgatggcacgttacttaccgtggtggggagaaagcgcaggtacctcctagatactctctctcccaccccacctccggcggccaacggccaagcaaacctccagccaagatttggggtatgtgggcagggctccggcgaaggggagtggccggggagtcctggtccaatggggcccgggggcggggacttcctcccatctctgtccagcatgcgtgtactcctcgcagttccatctacctcgcgggtgcctctggtgtctccagaggtctccgaccccagcccgcccccagccctcccgcccagcccgcagccccctccctctgttccccgacctcagaccctgggcttccgacctcgacatcatgggtgacgcagaaggcgaagacgaggtccagttcctgcggacggtgcgtatctctgggttaggggcctgtggggctatctcttggggctctctgagggtctctctgtctctgaatgtccctgtccggcttgctggtggtctctgagactcgaggtctcttcctatgtcactttgagtgactgtcactctgtcttttagtctccttcacctttctcactacagagaattagtaggattggggactccagaatgggaaagggatcttcggttgccctctcttctgactttagcgatttgtcccccacaagaaggacccccgagggagcacaccctcacaccatcttggaagcaggcacttggggaaggtggttctaattcctgggcttgatttagccatccccccacccccaccttagccctaattctctttttgctccagactctgacctatttaaattcttgagaagggagctggagtgagctggaggacacagctgcttccaactcctagcccttgagggtcttgtgggggagggatctcttgggttctgggtctttctttccttcttcgttttgggcaggagggctgctcccaatggctgctaatggtcttgcagggtctctgggtggtgtctctccccatctgtctctttgggtgtctccatgtctctgtctcttcctccatctcagtctccctgtctctgtttcttagcttaaggccctctgattttcgctgtctctctagctgggttactccctgcatctgagccccagctgggggcagggatgggaattggaacaacaggtgtccctcccagaatagccggcttttctggggcctgggcaggggatggggaggggatgagagggaggaggggctgccatctccttgtccttcccatcttcccctcccagtggctccgcagggtgtggggtcgtaaatatgggaggggacgtcctctcctctgggctaggtctgctgaccagacgctagccccgcccctccccccggggccctggagccacacaggaaatgctgacacagcattcctgccccagaataggaccctggcgagccgggtccggtttcctgggagagaggaacaaacagctggggctggtagtgaaggatggggacagctgggaaggggcctagcttcagccgagactctctccccagccccagcccctcagcagacaccatgggtcgggccctccccagccctaataagaccatggccatggccactggctcttgagctgtcgctctaaaccaggccctgtgccctgggcctctgcctcctgagacatctaattatatccttgctgccctgtcttctgaggtagggtcctatctttatctccctgacagatttgagggaaaccaaggcccgaatggtagaatcactcacccaaggtcaaggccaggaagtggcatctctggatgcccctggtgcccagccccattgccttcaccagagaaaatctgggcccagacttgccaaagtagtcagcgttagggttctggaggcttggccctggaatctctccaccccagactgggtcagtttttctgattgttactgaggtcgtggtggatttctcaaaactttctggaggctgggctcagtggctcatgcctgtaatctcagcactttgggaggccaaggtgagcggatcacttgaggtcaggagtttgagaccagcctggccaacatggtgaaaccccgtctctactaaaaatacaaaaaaatattagccaggcgtggtggtgcatgcctgtaatcttagctactcgggaggctgaagtgggaggattgcttgaacctgggaggcagaggttgcagtgagccgagattgcgccactgcacactccagcctgggcgacagggcgagactccatctcagaacaaaaaaccttctggaccacatcccgcccataagaaacattctgtcttacaactcagtacatgcacacatgcatagacatgactaaaaaccaactttattgaggtataattgacctgcaataaattttacccagtttatgtgttcaatgagttgttttgtttttgtttatttatttatttttttgagatggagtttcactcttgttgcccagactggagtgcaatggcgtgatcgcagctcactgcaacctctgcctcctgggttcaagcgattcttctgcctcagcctcctgagtagctgggattacaggcgcgtgccaccaagccgagctaattttttgtatttttagtagagatggggtttcaccatgttggccaggctggtcttgaactcctgacctcagatgatccacccatcttggcctcccaaggtgctgggattacaggtgtgagccaccacgcccggcctttttttttctttttgagacagagtctcaatctgttgcccaggctggagtacagcagtttggtggttggttcaacgcaacctccacttcccaggctccagtgatcctcccacctcagcctcctgagtagctgggactacacgtgcatagcaccatgcttggctaatttgtaaaattttttgtagaggtgaggtctcactatattgcccaggctggtgtcaaactcctgggctcaagaaatcctccggccttggcctcccaaagttttgggattacaggcataagccaccatgcccggcctttcttctttcactcagcataatatttttgacattcatccatgtagcatgtattgagtttgttgctttttgttgccgaatattattccattgtgcgactatactgtggtgtgtttatcagttcacctgctgatggacatttgagtcgtctccaatttttactattatagacaacacagggcctgtgaccattcacttgtacctatttttaactgaaacaagtctcataaaatgtagatggcccctgaagcatgatgggcacgctgtgattttctattcttgctccattttgcttcgtttggttaagtatgatggccacagcccccccaaactgatttcacttccctttggtgggtggtgacctctacccttacccaggctggggtttctcaaaccctggcccaagttagaagctcctggggtctggtaaacagtacgtattccctgctgaccccaaatcaggctcttgatggtggtaggggactgggccagcagggaagctatatttttaaccagaaccctccgcttccttcattttttttttctttttcttttttttttaagatggagtcttcctttgtagcccaggctggagtgcaatggcacaatctcggctcactgcaacctccgcctcctgggttcaagcgattctcctgtctcagcctcccgagtagctgggattacaggcatgcaccactacgcccggctaatttttgtacttttaatagagatggggtttcaccatgttggccaggctggtctcgaactcctgacctcaagtgatgcgcccaccttggcctcccaaagtgctgggattacaggaatgagccacctcgcccagcctgccttcattctaattcaggaaaagtttgagaatcaatgtggtaatgattgggctctctgtcgctgctttgcactctggctttgccatttgcctgcttcctaatttggggcaagtgatttttatttttctctctgagcctcagtgttctcatctggaaaatggggacaagattatatacaatagccagaccccatggctcacacctgtaatcccttcgctttgggaggctgaagcaggacgattgcttgaggccgggagttcaaaaacagcctgggcaacatagggagaccttgtctttacaaaaaatgttaaactttagctgggcgtggcagtgtgcacctgtagtaccagctacttgggaggctgaggtgggaagatcacttgaaaccaggagtcggaagctgcagtgagctgtgatctcgccactgcactccagtctgggcaacagagcaagaccctgtgtctacaaaaatatatatatcttaaattagctgggtgtggtggcatgagcctgcagtcatagcttctcaggaggctgaatggagaggatcactcagcctaggagtccaaggctgcagtgagctatgatcgtaccactgcactccaccccaggagacagagtgagacccagtctcttaaaaaaaaaaaaaaagttatttttcaaggggcccatgcaagtatctctctgacctcatctcctccctgtttgcccctcctccttgcggccaccatcctgctccatctcctgtgctgtccctcaacaccccagcacccagactccctcctcttaccccagagatgagcaggcctgattccttcttgttatttggacaaggctcaactcaaatgtcacctccttggagaggctgtcacttcactccctcactgatctcatccccatcctaaaagccactctcttacatcagcctgggttattttttctataacacctatcactgacattaacattacatattaattcacctgtttattccctgtctccaccatgaggatttaagctccctgagggccgtgattttttttttttccttttgagacatggtctcaatctgtctcaggggccccagggaggtggggcttgattatgactcactgcagcctcgatttcccaggcttggcagtcctcccacctcagcctcccgagtagcagggactacaggaacataccaccatgctcggctaatttttaatttttaacttttgtagagatgggggtctcattatgtatattgcccaggctagtcttttttttttttttttttttgagatggagtctcgctctgtcacccaggctcgagttcagtggtgcgatctcggctcactacaagctccgcctcccaggttcacaccattctcctgcctcagcctcccgagtagctgggactacaggcgcccgccaccacacccggctaattttttgtatttttagtagagacggggtttcaccatgttagccaggatggtctcgatcctctgaccttgtgaccctcccaccttgtcctccgaaagtgctgggattacaggcgtgagccgccgtgcctggccccaggctggtcttaaactcctgggctcaagtaatccttctgcctcagcctcccaaactgttgagatttgcaggtgtgaaccaccgcgtccagccaaggcagggatcttgatcttcattgactttattcactgctctatatttagtgcctagaacagcacctggcccatggcagatgctcaaccaaagtctgttaaatgagtgtaaggcccagagcataaggcctgggagccagtaaagtgcctaataaaaacagcctataccattactatttttttttttgtttgttttttgagatggagttttccccaggctggagtttcactcttgttgccccagactggagtgcaatctggtggtagcaacctccacctcccaggctcaagccattctcctgcctcagcctcccaagtagctgggataacaggcatacgccaccatgcccgggtaattttgtatttttagtagagacagggtttctccatgttgttcaggctggtctcgaacttctgacctcaggtgatccacctgcctcggcctcccaaagtgctgggattacaggcgtgagccaccgcacccggctatttttggttttgtttgtttgtttttgagatggagtctcactctgtcacccaggctggagtgcaatggctcgatctcagctccctgcaacctctgcctcctgggttcaggcgattctcctggctcagactcccgagtagctggaactacaggcgtgcaccaccacaccccgctaatttttgtattttttagtagagatggggtttcaccatgttggccaggctggtctcgaactcctgacctcaagtgatccacctcctcggcctcccagagtgctgggattataggtgggaactactgcgcccggactcaatactgtcctttatggtacttccaggatccagcccgggctgtcacattgcattcaggtgccattagaaagcagtctataaataaagataaaatagcagtctattattaaaacaacacgcaaaagagagaatttagagaaagatgagcttaaaaagcaatttaacttgagcaagtttccaccttccagtggatcactttgcagaccccacttgggaggcctctggagccagttggactgaggttcaaatcccagctcctcctgttaccaactgtgtggccttggtccatctgtgtcccactttgagcttcagtttccccattttaaaatggggataagccaggcacaacagttcatgcctgtagtcccagctactcaggaggctgaggcaacaggattgcttgagtccaggaggtcaaggttgcagtgagctataatttacaccacttcactccagcctgggtgacacagcaagaccctgtctctaaaaataaaaataaatgggatgattacttgaggtcaggagttcgagagcagcctggccaacatggcgaaaccttgtctctactaaaaatataaaaattagccaggtgtggtggtgcacgcttgtaatttcagctatttgggaggctgaggcaggagaatcgcttgaacccaggaggtggaggctgcagtgggctgagattgcaccactgtgctccagcctgggcaacagagactatttcaaataaataaataataaaaaataaaataaatgggatgatgctggcttgtatctcaaggagttgtcaggagcaggtagagggcttgggtgggttgatcttgtcagtcactgtctttttcataaggaccagggtgggaggaggggcctgtggtctgcagtatttgtggtatccgggccaggcccccctggagacgctgcccctcggttccgcaggacgatgaggtggtcctgcagtgcagcgctaccgtgctcaaggagcagctcaagctctgcctggccgccgagggcttcggcaaccgcctgtgcttcctggagcccactagcaacgcgcaggtctgtgcaggagggagaggggcctggggacaggggcgtctgaaggggcagagaatcttgggtccaaagaagagggttctgggagtctgaaaggaggtgctgacaggagagaaagtgaggaggggggctaaggctaagaggggctacctgaggtggggaggggtggaggtctgagaagggaggggcagggggtctggggtgttggagggaatccctgtgtgcacagaagtgtggtaggccagggcgggggctgctgatccagaacgttccttggcaggtggctgagtgggcagaaagcctcgggtttaaggggaggtagcctgagagtccagaagaagggctggttggggaacgggtctcaggagggaggagcagggaaactgagggacggctggggcgtggggagggggggtagggagggacgaggcaaaggacctggagcacaaggaggaggggttttattttttatttttaaaagtttttcaggtaacaagactgaattattatggggtgttttagggggaaggaggccctcggcgggggcgggggaggatgggacagggcctgagatgcggagggcatctgatgggggtgggggcttgagggtcttaggtagtggagtctgagggaaggtgatccccaagtccgagctcgggaattctgagggtgggggcagctggagtctgagagggcaggggatcgaggggccgagggccttggatccaaggcaaaggggcctggagggtcaggggacacccgcaggggcctgacttgggagactgggggctgagaggtggaaggagcctggggtctgaaaggaggagacctggaggaggggcaggggctggcagaccaggggatgtggaatctgatgggggggaagtttcagagtctgagcgagtggggtctgaggagcagagtcttgagtttaggagttggacggtgggagactgaggagggagtataaggttgagcgccctcctgtgtctgtgaagcagaggtcagaggtgtttgaaggaaaaggcaggagcgaggactgtgtgatggtggaggcaggaggtggggcttcctttggggttggagggatgtggggtcatctgcagaggaggacacagaacaggagattcctgtccttggagcagggtcagtgtgtctcaggggagaggcatgggggtgaggcttcctatgagattaggtggaacacgggttagtggggagggttagggttagggaagtttctatggagtctgggtgggtctgaggtgtttgagggaggaggcacagaagaggtgttttcgtgatgttggtctagattcagtgtgtctgagggggatggcagagggcagggccttcctgtggggtgggggtggggtctggcgtctcaagagtgtgggcatccagactaggggagggagtgtggcagggaatgttgctggggtgggggggtcttctgacccctcacttacatccccctcccaccccagaatgtgccccccgatctggccatctgttgcttcgtcctggagcagtccctgtctgtgcgagccctgcaggagatgctggctaacacggtggaggctggcgtggaggtgaggaccccacctgggggtgggcggggtggcagagatgggcgagaggacccaggggtcgtttagggcacggtggcaaggatgggtgagaggacccgggggtcgcttaccatctgctcttcttcctctctctgccctgccccccacaggccctcaatttggataagtgggtaggtccggccttggatgtcacctgtccttccacccctcctgaccccaggcaggcccgtctctcaggcccacgccctgcacacaggggctggagggtcctcccccaccccagttgtcaggggctgtggagcccagaacaggccaggcaggaaggaaggaaggggatgggggcttctgagcccctgtccccgacgcctgctcctttctcctctttccagtcctttcccccaaccctgatcccagctcctctccgcatgggacctctcccacctcccccatcccaagcgtgagtccctctggtccaggagtgggtccaccatgtgatcacctggccccatcacatggtacccccatggcgcccttggagcatgggcatgtgacagccatgatgggaggcatggtgacatcgagcagtcagatgtctgccccaaggtccgggttggggaccttgtgctggggaggggcggctgtcttagactgcgggtgacattcacctatggaacaactgctaggcctgtcccagagcacacgggctgcagcgcagcatgatgggggaggtcagagcagaggggccagagtacacggaacacgagatcttgggggtgtcctcagggtccccaggaaactagaagacgggttcattctcctgagtgatttccagccaaggtgaaggcagcagagaggacagagtgggctttggggaatataaaatgctccatccataggcatctcagagatatagtccctgcttccgtgaatggggaaactgaggcagagagtcctgcaggagtctgagctgaggctgttttacctctaggcctgagcatggtattttacagggagcatcttgtcacctgtgactaggccagacctcttggggatctggagagtccggggatctgtgcttattctgttccctccctccccctgcagtcatcccagggcgggggacacaggacgctcctgtatggccatgccatcctgctccggcatgcacacagccgcatggtgagtgcaacctcggtgggcgtgggcaggggccagggcatgtggggcctgctagaaggaggctgacctccctctacaaccctagtatctgagctgcctcaccacctcccgctccatgactgacaagctggccttcgatgtgggactgcaggaggacgcaacaggtgcagcagctggaggggatgggggtgtgaaggggccccgcagcagggattcagggggtagaaggtctgcagaacgccaaggcaagcatgagactaccctggggacatgaatgggggcttcgtagcagagagtctgcggtacagtccagacagggagacagacacacgttggggaccactaggcagagagtctgaagtcaggaacggggaactgttaggcagagagttggtggcagtgataggagagttgtgggccaagggcccgggaggcctggtggagggagagccctggggaagagcattctgggaagccatcatctgacagccacccccattccatccccacccataggagaggcttgctggtggaccatgcacccagcctccaagcagaggtctgaaggagaaaaggtccgcgttggggatgacatcatccttgtcagtgtctcctccgagcgctacctggtgagccattgcggttcctcctgctcccaggtctgggggcgcatgggatggtccccatcttctcaccatgggtttgcctggctgatctcccacccccaaggtcctgactcccaatttcccatttcctgacccctgacatccaattttctgatttctgacctcccattgcccgacttgatcatttcctgatctgtgatctctgatgactctgtctcccatctgccggtttccgggtatccacccttgatttctggcctctgacgctgggactctcgcccacccctgcaatcgtctctgactgccgcatcctggtggcccccagcacctgtcgaccgccagtggggagctccaggttgacgcttccttcatgcagacactatggaacatgaaccccatctgctcccgctgcgaagagggtgagggccccagacctccccctaaatggagatccccccaaaacagacccttaatgttgcccttcaggcatacccaaatggagccttggaacctcagacctcaaacctagatctccaaattatggctctcacacttagatctccagctgaccccaaatccagacccccagagctcagaacccccccaaaccccgaactaaatatcaggctcccaaacttagaccccaaagtattagcccccaaggctcctaaactcagattcaaatcttaaaacatcaagtttaaagcttgtttaaaggccgggcatggtggctcacgcctgtaatctcagcactttgggaggccgaggcaggtggatcacctgagttcaggagtttgagaccagcctggccaacatggcgaaaccccatctttattaaaaatgcaaaattatctgagtgtggtggcatgtgcctgtaatcccacctactcaggagggtgaggcaggagaattgcttgaacctgggtggcagaggagcctgggtgacagagccagactctgcctcaaaaaaaaaaaaaaaaaaaaaaaaaaattaaactccttagacaataagcatagactatgatctcagcccctcaaacccagacccccaaattcaaacctcagatccccaaaccaagactccaatcttcagccctccaacctcagacttccaaacttcaatttcaaatcccaaaaaccaaaatccaccaaagcaaactcccaattcagattcccatgctaagactccaggcatggcccaatactttgaccccaagtctcataccccaaacttcagagtcctaaaccagacccacgctgggactcaaaccacagatggtttttgaccctcaaactcagaccctgaaactcagactcatcaacttctaactacaaagctcagatcgttcctacgtcataccccaaagctcagacttccaaaccctagattgtaacctcagatccccaacctcactttccagcttctggcctccaaaatcaatactcaaggccaagcgcggtggctcacgcctgtaatcccagcactttgaggggccaaggcgggtggatcacttgagatcaggagttcgagaccagcctgggccaacatggcaaaaccccatctctactaaaaatacaaaaattggctgggcatgatggcgggcggctgtagccccagctacttgggaggctgaggcagtattgcttgaatctgggaggcagaggttgcagtgagccaagattgcaccactgcactgcagcctgggcaacagagcaaaactctgtcttaaaaacaaaactaaacaaaacgaaacaaaaaaaccctcaaaattcaggccctaactccagaacccagcctcagacccaaccatcacccttctaaacccagaggccaaacctcaaccctagaactcagactccaacaccagtgaacattagacctccacctttcaccacacacacactctgaccccaacctcaaaagtccaaactcagaaccttaaatgacagactcacaactcccccagcctcagctctgcagacccagaccccccaaattaggtgcccagcttcagaccccaagtctcatatccccacttcaggcctcaaccttggcctgaaaataccctgaaactcagacctccaactgcaaaaccccaaactcagccctcaggttcccccaggggaggagcagggcccctgacttcatcttggctcctggtcttcctggggctccagcctcccattgaccaacttcccttgctcctctccaggcttcgtgacgggaggtcacgtcctccgcctctttcatggacatatggatgagtgtctgaccatttcccctgctgacagtgatgaccagcgcaggtctgggctgtggacgagagggcctggggtctaggggtggacgtggagggctgggaccctatgagtaggattagggaccagattccggggagctgaacccttgacttcactctcttctgtgtccccagacttgtctactatgaggggggagctgtgtgcactcatgcccgctccctctggaggctggagccactgagaatcaggtagggcggggaagatggggagagaccagggagaggctggggtcacctggcaggctgggaggacagaaaaggtcttgagggaagatctgataaagagactgaagggtctcgagggaaaatcagagcagcctgagagagagatgaaaatctcggccaggcgtggtgacttcatgcctgtaatcccagcactttgggaggctgaggcaagaggatcactggaggccagaagttcaaaaccagcctaggcaacatcatgagacccccgtctctgcaaaaaaaataaaataaaataaataaaataaagaattagccgggtgtggtggtgtgcacctttagtctcagctactttgtggggctgaggtgggaggatcactcgagcccagcgggtcaaggctgcagtgagctgagatcctgccacagtactccagtctgggtgacagagcaagatcctgtctcaaacaaacaaacaaacaaaacaaaaacaaaaagaggccaagcgtggtggctcacgcctgtaatgccagcactttgggaggccgaggcaggtggatcacttgaggtcaggagttccagaccaggctggctaacgtggtgaaaccctgtctctactaaagatacaaaaatttgcctggtgtggtggtgggcacctgtaatccttgctactggggaggctcaggcaggagaatcccttgaacccaggaggtggcggttgcagtgagctgagattgcaccattgcattccagcctgggcgacagagcgagactccatctcaaaaaaatacaaaaacaaaggccgggggcggtggctcacacctgtaatcccagcactttgggaagccgaggcaggtggatcatttgaggtcaggagttcaagaccagcctggccaacatggtgaaaccccgtctccactaaaaatacaaaattagccaggcggtagtggcacgcacctgtaatcccagcttctcgggaggctgaggcaggagaatcacttgagcctgggaggcagaggttgcagtgaggtgagattgtgccactgcactccagcctgggcaacagagtgaggccctgccttaaaaaaaaaaaaaaaaacaagcaaaacaaaaataaaaaatgaagtctctctggagtcctgtgggaaaaggaggtttggggggtttttgagggagagattgggggccctgagtaaaatgatgggggaatttaggggtctggaaaaacgagggcactggagacatttgggaagccctgaggaagctgtgaaggcctgagagaggattggggttcctaagggaggactaggggtcctaattaagatggtttgaggaacactggaagagggttcggggcttgaggaggtttggaccaagactatagtgtccaggccgggtgcagtggctcatgcctgtaatcccagcactttgggaggccgaggtgggaggattgcttgagccctggagttcaagatcagcttgggcaacatagcaagacctggtttctgtaaaaaaaagaaaaagaagaaaagactgtaatgtccatgggagaactggggggtcctctgactccccttggctctcaccctccacagctggagtgggagccacctgcgctggggccagccactccgagtccggcatgtcactaccgggcagtacctagcgctcaccgaggaccagggcctggtggtggttgacgccagcaaggctcacaccaaggctacctccttctgcttccgcatctccaaggtcagtggggtttgtggcgccctccctcacctgaagcccccagtcccagcccagcctgcactctgcagtccctcaggggggctcccctgctaaacacacaggcagaggaggctgacctgtgtcccctgcccctgtaggagaagctggatgtggcccccaagcgggatgtggagggcatgggcccccctgagatcaagtacggggagtcactgtgcttcgtgcagcatgtggcctcaggactgtggctcacctatgctgctccagaccccaaggccctgcggctcggcgtgctcaagaagaaggtgggtgtaatcccagctactcaggaggctgaggtgggagaatcgcttgagtccaggaggtcaaggctgcagtgagctggtgatcatgccactgtactccagcctgggtgacagagtgagatggggtgcaggagggtactgaggggtggtgcttgagaccttgggagtttgaggatgagactgagagaaagatagagactgggagagaaactgagactgagagaaacagcaaaaaagacaaagggatatatctacatggagagagagagagagcagaaatctgtagacagacagggaaaggcagagataaagaggcatggaaacagagaaatagagaaagatagagacagagaaacagagacacggccgggcgtggtggctcatgcctgtaatcctagcactttgggaggcccaggcggttggatcacctgaggtcaggagtttgagaccagcctggccaacatggtgaaaccctgtctctactaaaaatacaaaaattagccaggcgtggtggcagctgcctgtaatcccagctactcaggaggctgaggcaggagaattgcttgaacctgggaagtggaggttgggagtgagccaatatcgtgccattgcactccagcctggctgacaagagtgaaactccgtctcagaaaaacaaaaacaaaacaaaacaaaaacaaaaacagagagagtgagaaaaagatggataatgaccaactgagaataactttcaacaaacaattactgagtacccgcgttgttctggttgtgtgtgcagaaaatagatgagctgtagcgacctgttccctgccctcccagtgctcagaaattgtgaacaaactgcctttagtgaagtacatagttttacaattaaggagtgggaaaactatttttggcagcaggaacagcatgtgcaaaggtcctgaggttaacatgagcttggcttgttgcagtagcagaaagaagccacagtgtggaacagggtgagcaggctggagtagtggttggtgaggaaagagaggggatgggaacagctcgtgtgaggccttgtgggccatgggagaggtctagttttgtttgtttgtttgttttttgtagagacgaggtctcattatattacacaggctggtctcaaactcctggggctcaagtgatcctcctgcctcagcctcccaaagtgctgagattaaagtgaagtgtgagccactgctcctggccaggttctagtttttatcctgagtgagatgggctcacaggagattttgagcagggcagggaagtgacctgacgcaggatcacagaattcttaggctgtctctgggaacagactacggtcaggggacagagccagagcagggagaccagagaagagactgccatgatgttacaaatgggagatgacagtggacaggaccaggaggggactgtggagttgggaagagtagtagattctggtggggtcctgagggtagagccaacaggatttgctgacagattggctgtggggtgagagaaggggaggggttgaggatgatgccatgattttttgccccaagcaactggaaggatggaagtgctgaaacagcctcattgtctggagtatcacccaaggtttgtggtctcacagccacagagaacaaggacgcagacacacaaagagtgaggttaagaggggacatttaataggcgaaagaaggagctctctactgcagagaagggtcccagaaaaatgggttgaaatgcagggggttccatggtgaaatgcagggggctttacagatgagctggtggggaggtggtatctgatttacctagggtgcaaaagactggttggaccagttgtgccatttgcatagggcacaaatttctggctgcctccaccctaagcttttattgtacaagcgggtcctctgcctgagctggccatgttgcccattccttttctgtacaacgtggaaacaataaataaataaataactaaataaagggaagatggagcctccatgttggacatgcgtagccccaggtataccttttctatcggcacattcccccatgcaagcttgtagctcgattttccaggctgctctttgttagaaaagaaattattttgggggctgctttccgttagaaaggaaactctgccgaggactctgttgcccttactctctgcctaaataatttttttctacctcttgtatcagtgccatcaaccaagttaggggacagtcagtgttggctcagaaggacagggatcttaggctttactgccagtgcctagaacagagccacttactacagccttgctgaatggacaagtaggaatccttggggaggcactcgtttgcaaaaacaggcctgtagttgaatacatgagccaagggcgtagagacggggcctgggccatgtccaaagtggggacacgtgagcatcatcagcaggtggatggtgtttacagccgcagactggatgagttctggggaggtcggcttggggtgaagctggcagccatgatggtctcacctcgtggaaaggtggtctggcattctatctgggacaggttcaatttgggggttagagctttctggtcggggggaatgttaagtcagcagtaggtacaggtggaaagggtctggcctggagacagagacaggaaggagatagggatagagagatagagagggagaggcagggacagaggtgagagagatagagagacaaagacagacaaaaccaaaaacagggacagagagagacagagaggagagagagaatcaaagacacagaggagacagatgacgggggacagaaaaatgaggaggaatttgcagtgagattctgcagagcagggaggagggggcaagtgcagaactcaagtctagacagacgtcttgggggcatggccctgggtggctgggcccactccagacctctgtctccccactcctaggccatgctgcaccaggagggccacatggacgacgcactgtcgctgacccgctgccagcaggaggagtcccaggccgcccgcatgatccacagcaccaatggcctatacaaccagttcatcaagtgagcaacctgccctccctgctggggtgactcctgtgctgtcccatgctccgggcatccatacacttggcctctttcatctctacctctgttgcccacacccttgtctaacatatacatgggccaagcgcagtggctcacacctgtaatcccaagactttgggagggcaaggcatgaggatcgcttgggcccaggagcttgagaccagcctgggcagcatagggagaccccgcctctaccaaaaaaaaaaaaaaaaaaaaaaaaattaggctgggcacagtggctcatgcctgtaatcctagcactttgagaggctgaggcgggcagatcgcttgagcccaggagttcgagaccagcctgagcaatatagtgaaaccctgtctctataaaaaaaataacaaaatattggccaggtgtggtggcacgtgcctgtagtcccagctgcatgggaagctgaggaaggaggattgcttgagccgagggggcagaggctgcagtgagccactatactccagcttcactgacagagcgagacccttctcaaaaaataataacaataatatacacatgacccctaacctctaaactcctgacctctgtacacttgacccctaatctgaccttgacaaccatgatcacattcctgatcatcacccaactttcacacccctgacacccagagcctggaccctggacctctccatccctgagttccgggacccccctgtacctacacaggagcgagtcccagtcccagctctgcccttggccattgtgtgacctcggacaaatgcttttccctctctgcgtctcggtctccctctctgtaaaacgggtgggtctgggggagtcttgcgggagtgaggttgcggcagtgacgttgcggcagttagcgctcccagccgtggctgacagctgcgaggtccctgtaggagcctggacagcttcagcgggaagccacggggctcggggccacccgctggcacggcgctgcccatcgagggcgttatcctgagcctgcaggacctcatcatctacttcgagcctccctccgaggacttgcagcacgaggagaagcagagcaagctgcgaagcctgcgcaaccgccagagcctcttccaggaggaggtgaggacgtggcgagggcggagcggggcctgtgggcccagggggcgggaccactgaggggcggggccacggcgctgggcggggcagggcctgagggacctggggaagtagggtctgagaagggggcggggcaggagaaggagccggacaggaaccccagccagtgagaacacgatggggcggggccttgggaggggcgggcctgctgtgctggtgggcaggacctttgggaaggggcagggcgtatggccgaccagggggcggggcctggagagaaggatggaataaaagagctgaggggcggggcctatgtgaagctcaggtatagggtgaggcctggggaggtgaggccaggagtggggccagaggtcagaggtagggctgccgactcagcgggcggggtctgctggcgcggggtctgtggggtgggcggacagaatcagtgtggggtatgggaggtgccgaggcagaaatagatctttgggcattagggaggggaggccagctgtgaacaaaacagaaaaaaatctctgtccttatggagttgacatggcggggagagacaggagatcaataaaataaataagtaaattgtatggcatattagatggtaataactgttaaagagaaaaattcagcaggtaaggggtagggagtgttggggttttgcagtttaagacagagctgtcagacagggtgacctggaggaagagaggaagccatgtgcaaaggccatgaggtgggcgggtgtttggcatgttccagaaacagtcaggtggtgattggagcagggaggcttgggtgggggagtgggaggaaatgagggcagagaggtgacgagggccaggccttggtgaggactttggctttgggagccacaggaggttttggtcctctacagtcacagctagttagtggcagagccggtcagtgtgatgccactttggttgtgctctccactttgaggcactgctcctctcactactgatctaggccccaggatgcagatacaacaattgttttgttttgtcttgttttttgaaacagagtctctctctgtcacccaggctggagtgcagtggtgtgatcttggctcactgcaacctccacctcccaggttcaaatgattctcctgcctcctcagcctcccaagtagctgaaactacaggtgtgagccaccacgcctggctaatttttgtatttttagtagagatggggtttcgccatgttggccaggctcgtctcaaactcctgacctcaggtgatccacccgcctccacctcccaaagagctgggattacaggcgtgagccactgcacccagacagttttgtcctttttgttgatttcactgtttataatgtctcccaagtgtagtgctgaagtgctgtctagctttcctaagtgcaagaaagctatgatgtgccttactgagaaaatatgtgttagataagcttaattaaggcatgagttatagtactgttggctgtgaatttaatgttaatgactcaacaatatatattaaataactgtctttaaacagaaacataaaaaacaaggttatgtaataagtggttgatgaaaatactgtcacagactctcagggactccctgtatttcccctagaagcagtggttcagtatttgataattcagtcttcataatcactttatagaacataactatgaataatgagaattgattgtatatgttttatgtacttttctgtatgtatattatgattcacaatgaaataagaaaaaatattaaaatgtaaaaaaaaaaagaaaagaaaagataaagtgagaaaaatctttctgatggttggtgtggagaatgaactgggcctctccagttggtgggagtggggttccagttggatggttggtgggagtggggttcctggaagtgagtaggatggagagaaaagtgcaggaaggggaagtataaactcagtcctggtgttaataaggactgaattatcatagactgaatctcatattggggatagagtcagagaggacaagaatagatatggggagccaaggaggagaggagagcaatgggactgattgggaatatgaaaccaaaggggctgatttagatctgggaacacaccgtcactagttgttgaaggaatatgaattcgtgaatccaagaaagacaaggaagggagggcctgggtctcctattgtgatgcctcttattttcctcatcctaggggatgctctccatggtcctgaattgcatagaccgcctaaatgtctacaccactgctgcccactttgctgagtttgcaggggaggaggcagccgagtcctggaaagagattgtgaatcttctctatgaactcctaggtaggggtcccagtcctgactcccctgagaacaccccagatccccagtcctattggatctgacacctcttcccccctcagcttctctaatccgtggcaatcgtagcaactgtgccctcttctccacaaacttggactggctggtcagcaagctggatcggctggaggcctcgtctggtaggagaacccgggggagtgggacagaggcttgtgggaggggatgggcatggccgcttcacctctcattctgggcaccctggcaggcatcctggaggtcctgtactgtgtcctcattgagagtccagaggttctgaacatcatccaggagaatcacatcaagtccatcatctccctcctggacaagcatgggaggaaccacaaggtcggcccctcacccctgacctctcatcccctgaactctgaatgctggcctctccccagggctccagaactctgctcactccctcacttccctcctccatctcatctctcacctgtacgccactcccactggctttcatctccacacaggggtctcaaacaatgactcttaagttgattctgggccacagatgtgcttggttagatctctgaaatgttttttttttttttttttttttgagacagagtctcacactgtcgctcagactggagtgtagtggcgctatcttggctcactgcaacctctgcctcctgggttcaagcgattctcctgcctcggcctcccaagtagctgggactacaggcacacaccaccacgcccagctaatttttgtattttttttttagtagagacagggtttcacaatgttggccaggatggtctcgatctcttggcttcatgatccgtccacctcagcctcccaaatgctggaattacaggcgtgaaccaccagcgcctggcatttttttttttttttttttgatacagagtctcgctctgtcacccagactggagtgggagtgcagtggcatgatctcagctcactgcaacctctgcttcccgggttcaagcaattctcctgcctcagcctcctgagtagctgggattacaggtgcccgccaccacgcccagctaatttttgtaattttagtagagacagggtttcaccatgttggccagtctggtctcgaactcctgacctcaggtgatccacccactttggcctcccaaagtgctgggattacaggtgtgagccaccgtgccccaccggtggcgctgaaatgtttttaaaattttcaaatattacagcctctaggtggactgtatatatatacacacactctgtagtttgccatagccctacaagttcctgttgcattatttctaaccacttcacacatttattcagtcggagcaaaagtaattgcagttttgctattaaaaggaatgacagccgggcatggtggctcacgcctgtaatcccagcactttgggaggccaaggcgggcggatcacgaggtcaggagatcgagaccatcctggctaatgcggtgaaaccctgtctctactaaaaatacaaaaaattagccaggcatggtggcaggcgcctgtagtcccagctactcgggaggctgaggcaggagaatgatgtgaacccgggaggcagagcttgcagtgagctgagattgcgccactgcactccagcctgggcgacagagccagactccatctccaaaaaaaaaaaaaaaaaaaaaaaaaggaataacaaaaaccagaattacttttgctccagcctaatacattttccacttggcccctaaagacacaagtttgcaacccctgctgatttaaaatttcatcttgattcctgtgtctctcactggtcgtttcagtctgccttctgacctcttacctcactactccagtatctccttccttacattgctgataccttatcccaactcatgtgaccctccctcagcctcttgccagatcttcctctttgacccctaacctttctctgatccctgaccttccactttcaccacctcctctcagtcaaaattgccacatcttatcccgatgcgctgtcctttcctcctggcttccctccctcccagggttcttctgtagatcctgccctggtgcctacacaccctttaacctctgaccttgacctctaggtcctggacgtgctatgctccctgtgtgtgtgtaatggtgtggctgtacgctccaaccaagatcttattactgagaacttgctgcctggccgtgagcttctgctgcagacaaacctcatcaactatgtcaccaggtctggctctcaacatctgaccccagaactcagaacctctcaaccctctccctgacttagagactccacacccagatggatgtcctttccttaatctcccaccccagggttaacaaccagtcctcacagatgtccactgtggccccactctcccttggcatccactcctcttgttctgtcttcctggctccatttctgcctctatctgtttctctttctttctccctctccctctctctctgttttctctttttatctttgcctgtttctgtcttgattcttcctccatgtctttctccctgtctctctcccatctctctctctctgtctttggatgtctgtctctctctggcttcccaccacttggctctcctctctgcctctccgtcatccccctctcctgtcccatctctcctgcagcatccgccccaacatctttgtgggccgagcggaaggcaccacgcagtacagcaaatggtactttgaggtgatggtggacgaggtgactccatttctgacagctcaggccacccacttgcgggtgggctgggccctcaccgagggctacaccccctaccctggggccggcgagggctggggcggcaacggggtcggcgatgacctctattcctacggctttgatggactgcatctctggacaggtacctgaccccttccaggggaccctcacccctgaccattgaccccagcatttctaagtctctgaccatacaccttggggttctcaggatcctgactccctgaaaaggtcaacttttgaccttttagtcctcatttcccaagaccctaaccccagagcttctagattcccggctctgacttgtatcctcgttacctacagaactctgatcccagagtaggtgtgacctctgaccctagatatcccagaagaccacgcagattactgtgatctctgatctttgacttctaaccccaggagaatttatttatttatttattttgtttgtttgtttgtttgtttgtttattttgaaatggagtctcactctgtctcctaggctggagtgcagtagcatgatctcagctcactgcaacctctgcctctcgggttcaagtaattctcctgcctcagcctcctgagtagctgggattacaggcatgcaccaccacgcccggctcatttttgtatttttagtagagacagggtttcaccacattggccaggctggtctcctgacctcaagtgatccatccgccttggccttccaaagtgctgggattacaggtgtgagccactgcatccggcccccaggaggatttaatctctggccccacagctcagaatcctaacttcaggggaaccctgacctctgcccttcatttcagagctacgggagcatccaagggagcactttccattagggtttccaggatgcaatctccacaggagcctccaatatctgtcccttttctcttgttatcattggttctgtgggacctgtgacgtctgacccatctctggtgactgatgcaggacacgtggcacgcccagtgacttccccagggcagcacctcctggcccctgaagacgtgatcagctgctgcctggacctcagcgtgccgtccatctccttccgcatcaacggctgccccgtgcagggtgtctttgagtccttcaacctggacgggctcttcttccctgttgtcagcttctcggctggtgtcaagtgagaacttgcccccaccccacggccagtcctcagacctaggactgacctgagacagcttccccagtcactccatggtcccccaggaggccaggacactgcagcctaccatcaagactgactggtgtccagaacccttacttgaagatcccagggacctccacgtgactccagactctttccaatgacctcagattctccctaaccccacgtccttccagtaacctctgagataatggtctcagactctcctagtggtctctcaacaacccaaggttcttccggtgacctcccaatgacctcagactttcccagtgactccagaatctgatgatctcatgactccagaccttccttgactccccagtggcctcagactctcccaatgactccagaatctgataatgatctaatgactccagaccctccttaaccccctaatgacttcagactcttccaatgacaccatactctctcaataatctcttaataatgccagcatctcccgatgacctttcaatagacccagacttgcccagtgaccctgctcccgaataaccccatttattccaaagaccccccaatgatccagtcctttcccaatcaccccaagctctccgaatgtccattcagtggtgtttatgtttatttcataattgtaacagatgctcagtgacttctcaaatgaccttcttattggtctccccaaccttccaatgaccccgaatgctctgttgacctggggtctcctctgaaggactgttccatgaccttgcagtcatctgaactcttctagattaaccagagaccctcccgctctcaactccctggctcttaattcccttatgatattcctttgactctagactttcttttatgacttctaaatgacctccaggacactatgactgcccggtgacctttggtctccccagaactttccattgatcccaggactgcttccatgtcccccactgaccacagactgtcccccataacctcccctcaatgatccccattgtccttccttacccagggtgcggttcctccttggtggccgccatggtgaattcaagttcctgcccccacctggctatgctccatgccatgaggctgtgctccctcgagagcgactccatcttgaacccatcaaggagtatcgacgggaggggccccgggggcctcacctggtgggccccagtcgctgcctctcacacaccgacttcgtgccctgccctgtggacactgtccaggtactgcctgccctgcaaaggttttctggcgaggcagggtctcttaggagtcagagagggggcagggtgccatcgttcatgcctgtaatcccagcactttggatggccaggcgtggtggctcacgcctgtaagcccagcaatttgggaggccgaggcgggtggatcacctgaggtcaggagttcaagaccagcctggccaacacggtgaaagtgaaaccctgtctctactaaaaatacaaaaagttagctgggtgtggtggcgggcgcctataatcccagctactcgggagactgaggcaggagaatcgcttgaacccgggaggtggaggttgcagtgagctgaggtcacgccattgtactccagcctaagcaacaagagtgaaactccatgtcaaaacaaaacaaaacaaaaaacaaaaattagcatggtggcaggtgcctgtaatcccagctactcgggaggctgaggcagaattgcttgaacctgggaggcagaggttgcaatgagccaagatcgtgccactacactccagcctgggcaacagagtgagacttcatctcaaaacaaacaaacaaacaaaaacaaccaacattttgggaagccgaagtgggggcctcgcgcttgagcccgaaagttcgagattagtatgggtaacatagtgataccccgtctttatagaaaaaaatttttaatatttacaaatttagacaattttttaaaaggagtgagagaggtggggagctgccctagaagctgggaacctcgttgtttaacagatggagaaactgagcacagagaggcaaaggattctgtcagagcagaatcgcagtctcagggagtcctcaccactgccccacaaagaaagggtggctcacacctgcgatcctagaactctgagaggccgaggcaggattgcttgagtccacgagtttgagaccagcctaggcaacatagcaagaccccatctctactaaaaattaaaagttagctgaggtgatggtccacgactgtagtcccagctacttgggaggctgagatgggagggtcacttgagcccagggattcgaggctgcagtgagctatgattgtgccactgcactccagcctgggtgacagagcaaaaccctgaaaaaaaaaaaaaaaaaaagaaagggagagagagagagaaagaaagaaaaaggctgggtgtggtggctcatgcctgtaatctcagcactttgggaggctgaggcgggcagatcacctaaagtcaggaattcaagaccagcctggccaacatggtgaaaccccatctctactgaaaatacaaaaatgagccaggcatggtggcaggcacctgtaatcccagctactcaggaggctgaggcaggagaatcacttgaacccgggaggtggaggttgcagtgagccgagatcgcaccactgcactccagcctgggcgacagagcaagactccatctcaaaagaagaaagaaagaaaggactgtttttgccttccctccaagcatgtccctataggagggaatataggttaggtttaaaagcctgacagcaaaggtttggttttcagtcacgtgatcttgggcatgtgacctcccctccctgagcctcagtttgttcctccgtgaggaaaaggggataacaccctgatatctgatagcattgttcattgttgtgaaggtaagatgaatggatataggcaagatgcttagtccagtcctgattaaacagtaagcactcaagacagtcactcattattagtagcagtgatatcatctgcgggggtgacttcatccccctgtccccagaccagtgccctgggcctcaccctggatgcctctgtccccatcccccagcctgtcagcctcgtgggctgtccactcggcctcccagacatccccccgaccccgctttcctcatccccatgtcccgcccaagtccaaaccatcattgcctcttgcctgcggaacgccaacaccgctactgtctactaggctcttaccctctgccaggcatcgatattaactatgtaacatttagtaatttacattaatgatctcactgagtccttattaggtatcgctatgatcctcatacggagaaggaaggagactcctccattcttttcattcagcaaacatttcctgagcctctcttctgggtctgagtctggttctgggctggatagggctggggacttggtggagaccagggcagccccaggccctgccctcatggagctcccagtccacgggggagacagacccgtcccagataattccttaatactctctcttcttttttttttttttttttttttggagacagagtcttgctctgttgcccaggctgaagtgcagtggcacaatcttggctcactgcaacctctgcctccagagttcaagcaattctcctgccttagcctcccaagtaactgggactacaggtgcgcaccaccacatctggctaattttttgtatttttagaagagaaggtgtttcaccgtgttgcctaggctggtcttgaactcctgacctcaggcgatctgccccccccccccccacttagcctcccaaagtgctgggattacagatgtgagccactacggctggccctggataattccttaattctgagaatgctaagccctcacccatctgagtgtcaaccctggagtcaaggcgagggatggggagcagggctgctggatggtgggaaagggggtgctggaggagcctcccagggctcacaggtgttcttggaaagaggggtcatgatggaggagggtagagggaccttggggtctcaagaacgtccctctgcctctagattgtcctgccgccccatctggagcgcattcgggagaagctggcggagaacatccacgagctctgggcgctaacccgcatcgagcagggctggacctacggcccggtgaggggctgcctgcagcctgcgggaggccggctagacttgcggtgccaggagggagagcggctcaccggcggagaggagggagggaccacagggcaccagggggtccttggactgagggtggcagaactagggttggaggtcaggggtcatagtctgggcatgtggggagtgggaaggaaaggggagcacatggagttgaccctgggttttctccaggttcgggatgacaacaagaggctgcacccgtgtcttgtggacttccacagccttccagagcctgagaggaactacaacctgcagatgtctggggagacgctcaagtgagggcccaggggagccgggggttggggctggctgctggtgcggtgggggagggaggcatggagagacagggcaggaggtagagactgagagagagaaggatggaggggacagggattgtgagacataaacaaatggggagtggccgggcacggtggctcacacctgtaatcctagcactttgggaggccgagacgggtggatcacttgaggtcagcagttcgagaccagtctggccaacatggcaaaaccccgtctctactaaaaatacaaaacttagccgggcgtggtggtgcacctctgtaatcccagctcctcaggaggctgaggcaggagaatcatttgaacctgggaggcagaggttgcagcgagccgagatcacactactgcactccagcctgggcgacagagcgagacaccgtttcagaaaaaaaaaaaaaaaaaaaaaaaaaaaaaaagaagcaaacggggagcaagaaagggacagaggcagaaagagagagaaagaaaaggtggggatggaaagagagagagatgcagaaagagacagggagacaggagaaagtggcagacaggaaaagacagacatagttagttatacagacaaggcgcagggaaagacagaagtcatgaagcctgaggccaggatcaagagagacagggccagagcgccccaggcactgaagcagcagaggtagagggagctggagaccctgaggccgtgggaggagacggggcagggagctctgaggggcgtgacctgtcgcctccactcccccacccccaggactctgctggctctgggctgccacgtgggcatggcggatgagaaggcggaggacaacctgaagaagacaaaactccccaagacgtgagtgtgggcagccaggtcccgtctggggatggactgggggctggggatgctgtgctaagggctggggaggtcgaggggtcttgtggggaggctgaggttagggaggaaggagacttgggttagggtgaaggtcatagggtcagggctctggggtcagaggtgaatgtccaggattgaggagttaggagtttcagagagagagagagggagggtatgagtccaggatccaggctcagggtctgcctagagtcagggaaaatgagagcagaggtcacatgtccacgtaaggggtaaggggccaatggtaagaggtgagaatctggaggtcgttggagtcgtctaagtaagggatcctgaaattataggtgagcagttacacgtcctgagttcagaggtcaaggactccagacccaggagtttggggtggatgaggactgggatcagagtaagaaacctcagagtgggctgggtgaggtggctcacacctgtaatcccagcactttgggaggttgaggcaggaagatcacttgagcccagttcaagaccagcctgggcaacatggtgagacccctctacaaaaaatttaaaaattagcaggacatggtggtgggacatgcctgtagttccagcaacttgggaggttgagatgggagaattgcttgaacccaggagtttgaggctgcagtgagccatgattgcaccaccgcactccagcctgggtgacagaacgagaaaacaacctcaaaaaaacaaaaagagccgggctcagtcgctcacgcctgtaatccgagcactttgggaggccgaggcgggcggatcacctgaggtcgggaattcgagaccagcctgaccaacacggtgaaacccaccctctaccaaaaatacaaaattagccgggtgtggtggcacatgcctgtaatccctgctactccggaggctgaggcaggagaatcacttgaacccaggaggtggaggttgcagtgagccgagatcgtgccattgcactccagcctgggcaacaagagtgaaactccgtatcaaaaaaaaaacaaagagagagaaaaacctcaaagttagtggtgagaggtctgagagagttccggggttagagataggggtcccaaagtcaagacaaagggggctagaggtcattgatgtcaaagcccttgctagggtcccaggatcctagggtcagaagccagggatctcaaaacttattctaaaatttcatagaactgcaacattatatcaaaggtcagaaacgccgaagctgggacaagggtcagcagtcagggatcccatatagtgcagagcccggaagtggaggtgagggccttgtcccatggagccctaccatgcccgcaggtatatgatgagcaatgggtacaagccggctccgctggacctgagccacgtgcggctgacgccggcgcagacgacactggtggaccgtctggcagaaaatgggcacaacgtgtgggcccgagaccgcgtgggccagggctggagctacagcgcagtgcaggacatcccagcgcgccgaaaccctcggctggtgccctaccgcctgctggatgaagccaccaagcgcagcaaccgggacagcctctgccaggccgtgcgcaccctcctgggctacggctacaacatcgagcctcctgaccaggagcccagtgagtgctcacccctggccctggccctgactcctaccccaactctgaccccagccccgatccctgatctctgacctgactcagcccccaaatgggctatatctttttttttttttttttttttgagacggagtctcgctgtccccaggctggagtgcaatggcgcgatctctgctcactgcaagctccacctcctgggttcacaccattctcctgcctcagccttccgagtagctgggattaccggcgggtgccaccacgcctggctaattttttgtatttttagtagagacaggatttcaccgttttagccaggatggtctcgatctcctgacctcgtgatccgcctgcctcggactcccaaagtgctgggattacaggcgtgagccactgcacctggcccaaatgggctatatctatcacatcgagcagactgaccaggaggtcagaaaggactgacccctccccgaaactctgagccttaccccagttccaactcggaacctgatggaaccacttccctttacctgacgccagccctgcctgggctatgactgcaaaccagagccgtcagcctaggaacccaatgagtgccaaccccacctttgactctgattcctgacctctagctttgatccctaatcactaatctctgaactgtagctaccacatgaaggcacccaaccaagggcttagagagcctggtcacccctacccctaacctgactcctgacctatcactggcttccaatcccagccttgaccccaaaccctggccatggtccccaaccttcagtttctcaactcttggccccaacctgaatttccatcccttccataatcctggctctgaccctccaatcctggtctcagcccttcattctaatcaaccctgatcttgacccttaaccccagaccataactctgaccagttcactgagctggctttttccttctgtgtctctgccagtatccctgttttctgagaattctgactgctacagagatgggggtctctctcaacaggtccctgcctctctctgacttttctgaggttccccaattctcctctaactccaagaaattgaccctcttccaacagttccccaaagcccttactgtcccccaaagcctgtcttctaccaacttctcgatgtcttgggatccacatcttccctagcctctctgactctgcctggcctcatttataggtcaggtggagaaccagtctcgttgtgaccgggtgcgcatcttccgggcagagaaatcctatacagtgcagagcggccgctggtacttcgagtttgaagcagtcaccacaggcgagatgcgcgtgggctgggcgaggcccgagctgaggcctgatgtagagctgggagctgacgagctggcctatgtcttcaatgggcaccgcgtgggtacctccctgggcaccattctgccaggtcctgtggtctctcccacagcttgtctactctggccctgcctctgtctgtgcctcactctgtccccacttcatgcatctactgtaccactcatccacccatctatccatccattcaaccaatgattcatccatccatccatccatcgatctatcagacatccatctatccaaccaacaattcatccatccatccatccatccatcatccatccatccatccatccatccatccatccatccatccatccaaccatccatccagctaaccaaccatccattcatccagccaacatagggagaccccatctctacaaaaaataaaaaaattagctaggcaaggtagcatgcacatatagtcccatcatccatccatccatccatccatccatccatcatctatccatctgaccagccaaccatgcatccatccatgcattcaaccatccatccatcatccattcatccctcatccatccaaccaaccatccatccatccattcttccagccaactgtccatccatccatccaataaccatctgcccatccaacaaccatttatacaaccatccttcccttcttccctctatctgtcatccatttatttatgcttgcccctacttacactttgttctttctctgtatcaacccaggtaaactctcaactttccaatcattcttctgtccagccatgtacccaatttctcatccatctatctgtctcattagccactcatctattttgtgcatgtatataagcatatatggatctgtatggggacactgataggttcatttttcctttccatccctctacttactgctgcttccagccccccactaccactttggtggtctgcataatgctagccatggcaacagcagagaacccaggcagaagggatgagacacagagattagtggggagaaaaattcctgtgatcatggatgcaaatgtgaggaaagatggagacactgtggggtgacccctcttccataccacctgccctgaacctgacacttcgaatgtctgtcttcatatatctctccctccctgcttccttatctctccatttctctgtgtgtctccccacaccatgtcttctctggctgtcctcacagggccagcgctggcacttgggcagtgaaccatttgggcgcccctggcagccgggcgatgtcgttggctgtatgatcgacctcacagagaacaccattatcttcaccctcaatggcgaggtcctcatgtctgactcaggctccgaaacagccttccgggagattgagattggggacggtgagggctgagaccccttcacatgccctttcttgttttcctctgtctctcccaaccctgcactgcccttctgcctccaactctcccatccctacctcctcccctcggctccctctgccctgcccacctgccctcacccctgcccatccatcccctcccaccaggcttcctgcccgtctgcagcttgggacctggccaggtgggtcatctgaacctgggccaggacgtgagctctctgaggttctttgccatctgtggcctccaggaaggcttcgagccatttgccatcaacatgcagcgcccagtcaccacctggttcagcaaaggcctgccccagtttgagccagtgccccttgaacaccctcactatgaggtaaggactgagcccctcaatgccttctcatctgcctccaaagctccttccttccacagtgctcttctttgagtttctcttttccctccatgttaggacacaaaccacatggaagcaagtgtcagagtgatgggctcacgggctgtatgactccgggtgtaactttggcaaaccacagcttcctgaggtccaggtgcctcacctataaaataagggaaaccctgcctgggcaacaagcaaaactccatctctaaaaataaaaaaaaattaagtctaggcatggtagctcatgcctgttatcccagcacttagggaggctgaggcaggaggatcccttgagcccaggagttcaagaccagccttggcaacatagggagaccccgtctctacaaaaaataaaaaaaaaaattagcaaggtgtgtagtatgcacatatagccctagctactcaggaggttgagactggaggattgcttgattccaagaggtcaagactgcagtgaattagccagatgtggtggcacatgcctgtaattccagctacttagggggctgaggcaggagactcgcttgaacacgggagatggaggttgcagtgagccaagattgcgcccttgcactccagcctgggcaaggagagcgaaactccatctcaaaaaaaaaaaaaagttaaaggctgcagtgagctgtgttcacaccactgcactctagcctaagagacagagcaagaccctatctcaaaaaaaaatttttttttaataaataatttttaaaacttagctgggtgctgtggcacatgcctggtgtcccagccactcggcaaactgaggcaggaggatcctctgagctcaggaggtcgaggctgcagtaagctgattacacgactgcactccagcctgagtgacagagaggaccctgtctcattgaaaaaaaaaaaaaaaaaagagctgggcatggtggctcatgcctgtaatcccagcactttgggaggccaaggcgggcagatcacttgagcccagaagttcaagatgagcctggccaatatggcaaaaacccatctctactaaaaatactcccccaaaattaatggcgtggtggcgggtgcctgtagtcccagctactcaagaggctgaggcaggagaatcacttgaacccaggaggtggaggttgcagtaagctgaggttgcaccactgcactccagcctgggtgacagagcaagaccctatctttacaaacaaaacaaaacaaaacagaaggactctgcaaaaggagttttaagtatgggaacgtccagttgaggtctgagttttggaaaggtccctattggcagtggattgtaggaggtgacagtggagtcagaaggatcctagaggtggctgggacggggcagtactgcagagtggacgcagagttcctgacacctgccactaccagatgtccccaacccaaggcacagcatgctacacggaagtgagaatgaatacctggaaatacacacagccatgtggacgaatctcagacataatgtcgagtagaagaagccggagacaagagagcacaggctgtgggattccattcacagaaagttcaagaacaggcagagcggatctgtggtgtgctcagttgggaaattggttactatgaaagaataactcagagacattgttagttactttgaatgcaaatcacaggagggagctcagtcagtagactattgccaaagaacaaaggctggttggatgcggtggctcacgcctgtaatctcagcactgtgggaagccaaggtgggaggatcacttgagcctaggaattcaagaccagcctgggcaacatagcaaaaccctgtctctacacagaataaacaaaattatctgggcatggtggtatgtgcctgtggtcccagccacttgggaggctgaagtgggaggattgtttgagcccaggatttcggggctgcagtgagccgtggttgcaccacagcactccagcccaggtgacagagcaagacctgtctctaagaaaaaaagagtgaatgcagaaaccagatttataagacagaggggagaaagaggagagaaaaaagacccctaaagagtctgagaacaggctgggctcggtggctcatgcctgtaatcccagcagtttgggaggccgatgtgggtggctcacctgaggtcaggagttcgagaccagcctggccaacatagtgaaaccccgtctcttctaaaaatacaaaaaattagccaggcatggtgccgggcgcctgtaatcccagttactcgggaggctgaggcaggagaattgcttgaacccaggaggcaaaagttgcagtcagccaagattgcaccattgcactccagcctgggtgacagcgagactctgtctcaaaaaaaaaaaaaaaaaaaaagattctgagaacaaagaatcttgtatgcacagttttagggcaaattcattggctggcaaggagtacctaggttcatcttggcaactggtccttggagaggtcaacgtgaggaggggcatgaaagagaacaactttcattgtttaccgagtctctaggagacttttgagagtccattgtttttggtttttgttttttgagactgggtctcactctgtcacccaggctggagtccagtggcaagatctcagctccccacaacctctgcctcccgagttcaagcgattcttttgcctcagtctccttagtagctggaattacaggcatgtgccaccacgcctggctaatttttttgtatttttagtacagatgaggtttcaccatgctggccaggctggtctcaaactcctgacctcaggtgatcagcccgcctcagcctcccaaagtgctgggattacaggcatgagccactgcgccctgtcgctatttgtggaattgtaactgaacacaggttcagttgctcatcagttacagagtccaattaacaagagcgaggtctggtagaaagaaaatgactttattcatcaaaactagtcatggagaagtgaccggattcccatccgaagcaaccacttcaaatctaggggggaaagcaagggtttaaaaaggggaaacttggctgggggtggtggctcacgcctgtaatcctagcactttgggagactgaggcaggcggatcacatgaactcaggagattgagaccagcctgggcaacatggtgaaaccccgtctctaccaaaaatacaaaaattagccaggcgtgttggctcatgcttgaatccaggaggcagaggttgcagtgagccaagatcacaccattgcactccagcctgggtgacagagcaagactcttgtctaaaaaaaaaaaaaaaaaaaaaagaagtctgagaacaaagaatcttgtacgcacagtttttggggcaaattttcaggagactgagacacaagaatcatttgaaccctgtaggcagaggttgcggtgagccgagatcctgctattgcactccagcctgggccacagagcaagactgtgtctcaaaaaaaaaaaaaaaagcattgaagttgagctgcctggttactggttacagaatgacagagtagattgttagatggatgtagggaggttttggaagttaccccaagtgattccagtgtgtgtccggggctgctagtgtacacgacgcccagagaaatgttgcagagggctgcaagcaccccagggcccagcggtgtacccggccgggagcttcatccccctgcaggagtggggggcccttgactaattcccatgcaggtgcactatggcctaatggtggctccgtgtgtgaccaggtgtaggaccaacggcctggcctagcccgcctgcccagcccagtactccattccctgccacctcaggtatcccgagtggacggcactgtggacacgcccccctgcctgcgcctgacccaccgcacctggggctcccagaacagcctggtggagatgcttttcctgcggctgagcctcccagtccagttccaccagcacttccgctgcactgcaggggccaccccgctggcacctcctggcctgcagccccccgccgaggacgaggcccgggcggcggaacccgaccctgactacgaaaacctgcgccgctcagctgggggctggagcgaggcagagaacggcaaagaagggactgcgaaggagggcgcccccgggggcaccccgcaggcggggggagaggcgcagcccgccagggcggagaatgagaaggatgccaccaccgagaagaacaagaagagagggtgagtcgaggggggcccagagtggggattgggggctgccttgggacccccaagtaggcaaccacagtaacctgagaaacccccattgtaccccaaagtagacccatatatgctaagtggagtaagaataccgagagattctatcatgtctccaatgaaccccattattttcctgggatgccctaatgtccccaagaatatataattgggtaccctagtatctatatggagaactctattatccttgagtacctggagggccccaaagggcttcgcccaatggaccttatcatccgtggacactaaaagggacttcagtatcttcctaggagagtttactgcacagtaaggtatcccagtgaatacccagtggtcttctaaatggggatcctttctgtgtcacaaatgtaccccccgaaatctaacttaaagggagattctgagaaggtactaaatctgctttttccctacaatggcagtggtttcctttttttctttctatctttttttttttgaggaggaatctctgtcgccaggctggaatgcaatggcgcaatctcagctcactgcaacctccacctcccgggttcaagcgattcttctgcctcagcctcctgagtagctgggattacaggcacgcgccaccatgcccagctaatttttgtatttttagtagagacggggttttgccatgttggccaggctggtctcaaactcctgacctcaggtgatccacccacctcagcctcccaaagtgctgggattatagacatgagctaccacgcccggctccttttttttttttttttttttttttttttgagatggagtcttgctctgttgcccagtctggagtgcaatggcacgatcttggctctctgcaatctccgcctcctgggttcaagcaattctcctgcctcagcctcttgagtatctgggactacaggtgtgtgccaccacacccggctaatttttgtatttttggtagagacagggtttcaccatgttggccaggctggtcttgaactcctgacctcaggtgatccgtacgatggcagaggttttcaatgggattgaaaacccattgtgtctcttggtggatgtttggaaatgatggagtctttgtggtcattacagtttgggaggggctgctgctgctgggcgggggccccagggttccgcctgccttgcagtgtacaaaacagtgccgcacaatgaagaattgtccttttccaagtgcatttagcacctatacgagaaatgcatgtgggaaatgctgacttagggggacccccatataacccagtggggacctccatattcccagaaggcgcctttaatttgggtaactcagcatccacaagcgcagagcatagcacttctagaatggattagtctggggtaggtgggaatccagccctctagaggcaagacctggggtattagaagcagggtgtatccaagctggatgtgggggcatgaatattgcggtgggagggctgggcttgaaagctggctctcatggcgcctctcctcccactaccagcttcttattcaaggccaagaaggtcgccatgatgacccagccaccggccacccccacgctgccccgactccctcacgacgtggtgcctgcagacaaccgcgatgaccccgagatcatcctcaacaccaccacggtgtggaccagtaaccctcaattttggggtccccccgcatagcataggcactcctgaatttccaagtttagtgtgacagtccccagtagctgcccaccttacactggggactccccaatatacactagaaactcataaaatatggcacacacagatttaatcctttgaacccctaaatccatatagctatggcccacaaacggcagggagtacagtagaggtgtacagcacactgatataactcctggggatccccaaagccatgatataagccaatatagactagggaccccaacatttgggctcactcatataaacacaataccctcaatgtaatacctactctaatatattactgggaacaaaaattcataattgtcttaatatagttttgggatttccccaaatccaaaatatttcatagacagacagcctagtgcagtgctccccaactattttggcaccagggatcaattttgtggaagacagtttttccgtggaccacggatgcggggaaggatggtttcaggatgaaatgttccatctcggatcatcaggcatagattccttttttttttctttttatttttgagatggagtcttgctctgttgcccagtctggagtgcagtggtgtgatcttggctcactgaaacctctgcctcctgggttcaaacgattctcctgcctcagcctcctgagcagctgggataacaggctcctgccaccatgcccagctaatttttgttttctgttttttgtttttttgagatggagtctcagcctgtcgcccaggctggagtgcagtggcgcgatctcggctcactgcaacctctgcctcccgggttcaagtgattcttctgcctcagcctcccaagtagctgggactatgggcacacgccaccatgcccggctaatttttgtgtttttagtagaaacggggtttcaccatattggccaggctggtctcaaactcctgacctcgtggtctacccgcctcggtctcgcaaagtgctgggattacaggcatgagccaccgtgcctggcctaatttttgtatttttggtagaaacggggtttcaccatgttggccaggttggtctcaaatccccgacctcaaatgatcctactgcctcagactcccaaagtactgggattacaggtgtgagccaccgcgttcggctgtagattcttacaaggagtactcaccctaggtggcttggatcccagtaccagcccacagcctggggttggggatccctggcctcgagattagatcatgggccgactgggtgccacttgggcaaaagtcatttcaccactctatgccttctctcctatggaggtgctatggttttccatcagtagaatgggggtaaaaattatacctacctgatatggaggatgaagtgagttaatctgtgtagaccttagaacaggcctggcatgatggctcacacccgtagtcccagaacgttgggaggccaaggtgagaggatcacttcaatccaggaatttgaggctgcaggctacgatggtgcctctgcactccagcctggatgacagagggagactgcaactcaaaaaaaataaaaataaaaaaataaggaaagaaaaaaaagaagaagaagaaggaaagaaaaaaaagaccttagcacagtcagtgctatttgtgagcaattatttaattattttttgtatttttttattttgagatggagtctcactctgtcacccaggctggagtgcagtggcacgatctcggctcactgcaacctctgcctcccaggttcaagcgattctcctgcctcagcctcccgagtacctgggactacaggcgcccaccaccatgcccggctaatttttgtacttttagtagagacagagtttcaccatattggtcaggctggtctcaaactcctgacctcaggtgatccaccttcctcagcttcccaaagtgctgggattacaggcgtgagccaccatgcctggcctgcaattatttatttgtcagtctactgtaacctgggaggaacccaaatatggcactgtcacacaatattcccaagggactcctaaatctagaattgcacaaattgacacagaaacagacataaccagggggtgggggactcagatccaacaacttcctgttaaactcccagaggacccaacagtccagggaaaccaatttcgagtcccagggagcccgagtccctgacttccagactgaccactagttcccctccttgtgtcaccagtactattactccgtgagggtctttgctggacaggagcccagctgcgtgtgggcgggctgggtcacccctgactaccatcagcacgacatgagcttcgacctcagcaaggtccgggtcgtgacggtgaccatgggggatgaacaaggcaacgtccacagcaggtgccggggctggggggaggtgggaggtgcagggtggggagggcaggaggcagtcagagctcccgacaccagctctgtggctgcctggttgtgggacctaggaactttctggagcgggaggattctctggggcactgggcacccagctcggaagcttccctcctcctctttttcctcctctcttcctgccctggtatttttcttctcctcctcctcctctttatgcatttctcctattccattttctccttttccttctcatcctgtttcatctcacccttctccttctctgtcatctcattctctctcctcctgcttcccttgctttccctcctttcagacccccacccccatcctgactccccactgcgccagctgctaggaatcccagctccgaagagctcagtgtccggggcgaggggtttcagctctcaggtctgcaggcggtgggtgtttggggatgggactctgaggttgtgtgtttccgggagcttggggaagggggtgtccagggtccagagctactcacatgaggagtgcagtgaccgcttctgtctcctgcagcctcaagtgtagcaactgctacatggtgtggggcggagactttgtgagtcccgggcagcagggccggatcagccacacggaccttgtcattgggtgcctggtggacttggccactggcttaatgacctttacagccaatggcaaagagagcaacacctttttccaggtgagtccaggccacagcaatttagcgagagcatcatgtcccagcatcccaggacagctcttatagatgtcccctgaggccagacctcagagatggaacaaaaacagctcctaggctgtcctcaagaggtcgctgggagaccaccttgttgaaacttccatgaaactaaggcccagactggaggagatacagaatctcactctgttgcccagactggagtgcaatgggacgatcttggctcactgcaaccttcgcctcctgggttagagggattctcctgcctcagcctcctgagtagctgggattacaggcgagcaccacaacagccggctaagttttatgtttttagtagagacgaggtttcactgtgttggccaggctggtctcaaattcctgacctcaagtggtccacccacctcggcctcccaaagtgctgggattacaggcgtgagccaccacacccagccagagtccagccttgaccttggaaagaggtttctgttccctcttgagctgggtgacaccagtcaccaacttctctccaaccagggaacacgctaggatgggccagaatcctaaggtggccttttccttttcaacattttattctgaaaaatttcaatcatacagcaaaattgaaggagctatgtagataacaccctgtacccaccacctggaatctactatcaatgttgtagatattggctttatcacatattcacctacctgtccattaatctaaggtgggtttgtacaactttattttaattttttggcatccattgttggttatgaaattttattgcattttattttctttattttgagacagggcctcactctgtcccccaggctggagtgcagtggtgtgatcacagctgactgcagcctcaacttcccaggctcaagcaatccttctgtctcagcttcctaagtagctgggactataggcatgcaccaccttgactagctgattttttgtgtgtattgtttgtagagatgggttttcctcatattgtccaggctggtctctcgcttctgggctcaagcgatctccccaccttggcctcccaaaatgctgggattacaggcttgagtcactgtgcctggcttattttttatttttattttttgagacagggtttcgctctgttacccaggctggagtgccatggtgagatcacagctcactgcagccacaaccttcctggactcaagcgatcctcccacttcagcctcttgaatagttgagaacacaggcacgtgccaccatgcccagctaattttttttgtatttattgtgcagacggggtctcactatgttgcccaggctggtctcaaactcctggtctcaagcaatccttctgcctcagcctcccaaagtgctgggattgcaggcgtgagccactgctcctggctaaagctttatgttaaatggagaattaaaaacgtatacaagaatggaatagtataatgaactgccatgcccctgtcacacagcttcaactgtcacccactcacagccaatcttgtttcatcttttttgtctgtttgttttttgagagagggtctccctctgtcacccaggctggagtgcagtggcgcaatctcgactcattgcaacctctgcctcccaggttcaagtgatcctcccacctcagcctcctgagtagctgggactacaggtatgcaccaccatgcctggctaattttttttagttttagtggagacaggatcttgctatgttgcccaggctggtctcaaactcttgggctcaagcaatcctcctgcctcagcctcccaaagtgatgggatgacaggtataagccactgcgcctggcttgtttcatctttttatatctacttcccttccacacccactggataattttgaaggaaattgcagacatcagatagtttcctctgttttcagtgtgtagctttaaaagataaggatgatcttaaagagcataaccacaataccactatcacctaaaagaaaaaaaaacaatagtttctaaatatcatcaaatatccagtttgtgttcagatttctctggttgtccccaaaatgtcattttaccatttctttgtttgaatcagaatctaagtagggtcatatattttattttatttattatttatttttattttattttttgagacaatgtctcactctgtcacccagtctggagtgcagtggcatggtcttggctcactgcaaccttcgcctcccgggctcaagcctcctaagtatgtgagattacaggtgtgcgccaccacacccagctaatttttgtatttttagtagagacggggtctggctatattgcccagcctggtcttgaactcctgggctcaagtgaccctcctgccttggcctcccaaagtgctgggattacagtgtgaggcagcatgctcaaccttatttatttaattatttattttaatttattaagacagagtcttgctctgtcacccaggctggtgcgcagtggtgccaaccgtactcaaccttatttatttatttattttaatttattaagacagggtctcattctgtcacccaggctggtgcacagtggtgcaatcttggcttactgcagcctcaacctcctgggatcaaacgatcctcccacctcagcctcccaagtggctgggaccacagacacgcactaccacacctggctaatttttgtattttttgtagagacggtgttttgccatgttgcccaggccagtcttgaactcctgacctcaaactattcgcccacctccacctcccatgtaatcccagaatataaaacgtgctgggattacaggtgtgcaccaccacgctcgaccagggtcatatattttaggtggttgctctgtaccttgagtttcatttcatatgtagatttccccctccattccttcttctttcccaaccccccagaaatgtatttgttgaaggaaccaggctatttgtcctgtggcactttgctcctcaaagtgtggtccctggaccaaccagcaggagagctgcaggatctttagctgggtctagtcatgggcacctgcagttccagctaccctggaggctgaggcaggaggatcacctgagtctgggaggcagaggttgtagtgagctatgatagcgccactgcactccagcctgggtggcagagcgagacactgcttctttttaaaaaagttaaaatgggccgggcgtggtggctcacacctgtaatcccagcactttgggaggccgagttgggcagatcacctaaggtcaggagttcgagaccagcctgaccaacatggtgaaaccccatctctactaaaaatacaaaaattagcctggcgtggtgacgggcgcctgtaatcccagctacttgggaggctgagacaggagaatcgcttgaacgtgggaggtggagtttgcagtgagccgagatgatgccactgcactctctagcctggatgacagagtgagacgtcatctcaaaaaaataaataaacaaaattaaataaacccagagtctcagaccccttcccatgcctgccaaatcagaatctgtattttgacaggatcccaggggcttcctgtgtatattaaatctggagagggctggcctggtttcccatagcctggatctggctggtgcattcctgtggtggctttttaacattttcctttgtcccccatatttcctgtaaactgggagttgggtcccagggtgcaattagatcaggtttggtgtgggcgggactgcttcagagacaatgttgtttgtggaggcagaggctggctggatgggctccactgggaagacgggagaggggcaagacagtctgaggacacttcctggaattttttgttttgagatagggtcttgttctgtcacccaggctgaagtgcggtggtgcaatcatggctcactgcagcctcgacctcccaggatcaagcgattctctcatcttagcctcctgagtagctgcaactacagatatggaccgccatgcctcgctaattttttatgttttgtagagatggggtctcactacgttgcccaggctgctcttgaactcttaggctcaggtgaccctcccacttcagcctcccaaagttctaggattacaggtgtgagccatcacactctctgggttttgaatgagtatgcttgggagagaaatgcgaagggcattcccagtgcggggtgtgatgtgtgcagagacagatgacaggttgctctgggaaagttggaggaggttggcctggctggatcagaggtgggacagtctaagggtgacctctgagccattttggagcctctaacgcccagatgaggacctacaaattggccccagagtttgaggtccagagtcaaccctccctccagcccacccgtttgctcacctcgtcctcttctcctctgccaggtggaacccaacactaagctatttcctgccgtcttcgtcctgcccacccaccagaacgtcatccagtttgagctggggaagcagaaggtacaagtgcagtgatgggggcactaatggggccaggctgaggcaggagatgtggggaggccaggcgggcagagccactgaaggggagggggcaatccaagaggtctccctggaagtggtgtggtgggacagagggggctggccatcttgacccatgtgtgtctctctgccctcagaacatcatgccgttgtcagccgccatgttccaaagcgagcgcaagaacccggccccgcagtgcccaccgcggctggagatgcagatgctgatgccagtgtcctggagccgcatgcccaaccacttcctgcaggtggagacgaggcgtgccggcgagcggctgggctgggccgtgcagtgccaggagccgctgaccatgatggcgctgcacatccccgaggagaaccggtcagggccagcccagctatgcaggggtgggcaggtgttgcaagccctctggggtctgggtcccactcagtgcccctcctcaacacaaccccgggattccagactacaccccaggaatctccagacctacctcaggggactcgggctcagctcagacatccccagattatgtcccagggggattcagactcaacgcaggaggctctacaccatcccagtggaccgcaggcccaccctaagggaacccagacaataccccaaggacccagacccactccacagggccccaaacccatctcagggagccagacccacatcaacaccccagggggccccaagtacaccccaggatccctggacatgattcagggaggcttggatgcaccctagagtctcttgggcatatgcagggaggctttaagaagaatcccgtggatatttcaaacccaccccaggggacccagacacacctagggccacagatgcgttcacatggatggcagggttactcttaagaactctgaacgtggccaggcacagtgcctcacacctgtaatcccagcacgttgggaggctgaggcaggcaggtcacctgaggtcaggagtctctactaaaaatacaaaaattagccagttgtggtggtgtgcacccatcgtcccagctactcgggaggctgaggcatgagaattgcttaaacccaggaggcggaggttgcattgagctaggatcacgccactgcactccagcctgggcaacagagcaagatgccatctcaaaaaatagaattctgaacgtgggaggaatcccagactcacccaggaggcttctgacatgcctctttctttctttccttccttccttcctccctccttccctctctccttcccttccttccttccttcccctctccctccctccctcccttccttccttcctctctccctccctcacttccttcctttattcattcatccattcaacaaatagctttgggtccctcctatgtgctaggtagtattccaggctggagacaccaagcccctgtgaagtgacattctagtaatgcttgtacataactcaggatgctcggacatgcccaaagggacccagggtcatccccagggccccagacacacccgtttattaatttattcattcaacaaatatttatgggtacagtggctcatgtttgtaatctaagcacttcaggaggctgaggaggagggagggttgcttgaggccaggggtttgaaaccaccaggaagcacagtgagaacccgtctccacattttttttttctttttaattagcttggcttggtggcacacacatgtagtctcagctacttgggaggctgaggcaggaggattgcttaagcccaggagttcaaggctgcagagctaggatcgcaccactgcactctagcctgggcaacagagcaagaccccatcactaaacaacaacaacaacaaatgctaagcactttactatgtgctaggtgtggttttaggtgctgggaatataacaaacaaaagcagaaacaaaacaggcagaaatgtcctgcccttggaatttacattctaatggcactcaaacacaactagtatactcagacctgccagagggggacccagtctgggggcccaaacacatcttggaaacatcagatgttctacatggactctcagactcttacgaagtcccagaccatcccagggaccccagaggtatcccaggggcccccagatcccttagggacttccagaaccattgaaagactcctagacccagctccactgccctcacagaaccctaagctaggaggccactggaactccctgctgcagccttcgacactcgtctaagcatctctgcctttctggggtctgtgcctctgtctcccatcttctcccaggatgggtgaattgatagatggaatggtaggggtttgaaggaaagacgaatgaataaatgggtggatagtgatgaaggaaatggaggaagagatggtggcttgactgatgcaggaggctcattcatctgtccctgtctgtttcccacctctgctgcaggtgcatggacatcctggagctgtcggagcgcctggacctgcagcgcttccactcgcacaccctgcgcctctaccgcgctgtgtgcgccctgggcaacaatcgcgtggcgcacgctctgtgcagccacgtagaccaagctcagctgctgcacgccctggaggacgcgcacctgccaggcccactgcgcgcaggctactatgacctcctcatcagcatccacctcgaaagtgcctgccgcagccgccgctccatgctctctgaatacatcgtgcccctcacgcctgagacccgcgccatcacgctcttccctcctggaaggagcacagaaaatggtcacccccggcatggcctgccgggagttggagtcaccacttcgctgaggcccccgcatcatttctcgcccccctgtttcgtggccgctctgccagctgctggggcagcagaggccccggcccgcctcagccctgccatcccgctggaggccctgcgggacaaggcactgaggatgctgggggaggcggtgcgcgacggtgggcagcacgctcgcgaccccgtcgggggctccgtggagttccagtttgtgcctgtgctcaagctcgtgtccaccctgctggtaatggcttcctcctgctttcctctgtcccattcttctcccacattcccaaaactccagagatacatgcatcaatcctcctctatttatgcatccaaccacccattcattccctcctctatacatccatccacctttctttttattattattattttttcgagacggagtctcactgtcgcccaggctggagtgcagtggcgcaatctcagctcactgcaacctccgcctcccaggttcaagcaattctcctgcctcagccccccgagtagcggggactacaggcatgtgccaccacgccccgctaatatttgtattttcagtagagactgctttcaccatgttggccaggctggtctcaaactcctgacctcctgatctgcccaccttggcctcccaaagtgctgggattacaggcgtgagccaccgcgtccggcctccatccacctttctatgtatcctcccaccatctccctatctttcattcacctttccctccatctgctcacctgtcatctctttatgtttattcatctcttctttcttcctattcatctatccaaccaaccatcattcatccatccatcaatccatcagtcctccaccagcctttccatccacccattcatcctatccattcatgtgtatagatcatctttccatcaacaagatctttccatcaacatctttccatctgcctttctatccttttgttctccacccactccattcattcattcatgtacccatctatccaagtttcaatctatttgcccatccatcttttcattcattcatacagcagtccatctaccattccatctgttcatctatccacctacccatttatgtattaatctatctttccttccgtaggtccaataatcatctcctcccacctatgcgtccatccatacctacatccacagatccatccgttcctccagttcccacctacccttcatccatccatccatctctccattcatatgtacgtacacccatccacctacccacaaatccatttagccatccacacccatccatctacccgttccctatccttctctccatcccttgtatcatgtacccttttattcgtagacccatctaactattcatttatatatccatctttttggttttgtttgtgtgtttgtttgttttgagacaaagtcttgctctgtcacccaggctgaagagtgcagtggagcaatctcaaatcactgcaacctccgcttcccatgttcaagagattcttctgcctcagcctcccaagtagatgggattacaggtgcccgccaccatgcccggctaatttttgtatttttaatagagatggggtttcaccatgttgaccaggctggtcttgaactcctgactttgtgatctgcccacctcgtcctcccaaagtgctggaactataggcgtgagccaccgtgtccaggcaagacagggtctcgctctgtcacccaggctggagtgcaatggcacaataatggctcactgtagcctcaacctcctgggcttcagcaatccttctgcctcagcctcctgaatagctgggactacaggtgtgcactaccatgcccaggtaagttttaaattttttgtagaggtggagtctcgctattttgcccaagctggtcttgaactcctgggctcaagcaattctcccaccttggcctcccagtgttaggattacaggcatgagacgctctgctcaacctaattttgtttttatttattatttttaatttaattttattttgtaagagacagggtaatgcccaggctagaatgcagtggtatgattgtagcccactgcagtcttaaactcctgggttcaagtggtcatcttgcctcagcctcccgaagtactgtgattacaggtgtgagccaccacacctggccccaacttttcatacacaaacctatccagccatgtggccaaccatccccccaccctcatggctattcactaatttatctatttatccacatattcatttacttcctcatgcatctatcaacccatccatcacctactcacctacctatacatcatttatccttctctcatccatccacccatcatctcttcctccatcatttccttcatctctccatcatcatccacttattcatctttccttcaaacctctaccattccgactcgggattcatccagccagccatccaatcctccctccattcatccatctctctctctcccctgcactcttcttccctttcgtctactccctctttacttccatatgttagcatcttttaaactttaatttattttgtttttgagacagactctccgtctgtcatgcaggctggagtgcagtggcataatatcagctccctgcaacctctgcctcccagattcaagtgattctcttgcctcagcctcctgagtagctgggaatacaggcgtgcaccaccacacccagctaatttttttttgtatttttgtagagacggggtttcaccatgttggccaggctggtctcgaactcctggcctcaagtgatctgcccgccttggtctcccaaagtgctgggattacaggtgtgagcctcgcctcatgtgttagcatcttcattatgttgactgagagctggtgtatgctgggagctatgcaggcgtagggtgtgtcctgggccagaggacacagcacatgcttaggcttgggagaaaggacactcgcctgtgatgggagaggcactcatatttgggtctgtggtctgggctgtgtgggtgggacacagggtgtggacctgggtggatcttaaggagggtggatggcaaggcgggggatgccattcctgctgtgggaggaatcggatcagccaatgcaggaatgattggcatgtgcatgaggggcaggtctggagaatgaggccagggcctgatgatggaggccttgcaggccacagtgaagaaccgagactttgtcctgtaggtgatgggcatctttggcgatgaggatgtgaaacagatcttgaagatgattgagcctgaggtcttcactgaggaagaagaggaggaggacgaggaggaagagggtgaagaggaagatgaggaggagaaggaggaggatgaggaggaaacagcacaggaaaaggaagatgaggaaaaagaggaagaggaggcagcagaaggggagaaagaagaaggcttggaggaagggctgctccagatgaagttgccagagtctgtgaagttacaggtgggctgctgcttcctgcttttcggcctctgtccatctgggctgggagacacagggtaggtgggatgtgagtctggacttcgtcctcaggcagtggggagctgtggaaatgcatatggcagtgagcaatgccaacttggaaagatctctgttttccatggagatgagaccatggagaaggcagtcttttttgtttgttttttgcgacagaattttgctctgtcacccaggctggaatacagtggtgcgatctcggctcactgtaacctccgcctcccgggttcaagcaattctcctgcctcagcctcctgagtagctgggatcacaggcatgtgccaccacgcccagctaattttttgtatttttagtagagatggggtttcgccatgttggccaggctggtcttgaactcctgacttcaggtgatccacccacctcggcctcccaaaatgctgggattacaggcatgagccaccatgcttgaggaaggcaggcttaaggttccaggcgggaaatgattttggctggacctgggcagggccatggagaggggagaggaagcaagagaagtttcaaggaagtcctgatggtctcacctccatctctcctcccacacggctgtccttccacagatgtgccacctgctggagtatttctgtgaccaagagctgcagcaccgtgtggagtccctggcagcctttgcggagcgctatgtggacaagctccaggccaaccagcggagccgctatggcctcctcataaaagccttcagcatgaccgcagcagagactgcaagacgtacccgcgagttccgctccccaccccaggaacaggtcatctgacccctgacgctggccacttttactgtctaaaccccaacctcaacatctcctgactctgatcactgaggaccctcaacctctaaacccgtgcttgacccctgaccctagtgatacatttatctcctactctctgaatcaacctgacctctgagtcacctcagactgatgctgactcttttcaaacctctggccctagtctcccaaatagtcttcattaactcacacttcgactcatgaccttagacatggactaacaattgcatcttctatctctgatctcagagttcctgctttgggatctcagaccctcattctaatctttgaccttcccctagatcaatatgctattgcaattcaaagatggtacagatgaggaagactgtcctctccctgaagagattcgacaggatttgcttgactttcatcaagacctgctggcacactgtggtaaggagtggggatcagagagtcctccccatgctaactttctctcgagacctctccagaagtttccctaagatttcctgacaaccctctacagtatcggtgctatgtaactattggttgaatgaatgaatgagtgagtgaatgaatgtgttagtgaacagttagacaatgcgtgtttatatgggtatttgggtggatggctataagccagataaatgaatgggtatgtgaattgatggatagaagaagtgggtaaaaaatggctggctggatagatggaaggatgaagagaaggatggatggatggttgagaactgggtggagagatggctggctgggtggaaggacagatggatgacctccatagtttctgatgagaagtctgctgatagtcttactgagattcccttgcacatgatgaattatttttccttggctgacttttaagattttctctttgtctttgcctttcaacaatttagtatgacgtgtctaggtgtagagctctttgaatttatcctgttgaaagtttgttgagtttcttggatatatacttactttttatcaaagttggaatatttttgacaattatttattcaaatacttttctgcccctttcctcttcctctgggactctcattatgcatatattggtacacttgatggcatcccacaggtctctgaggatttctttcattttgctttttttttttttttgagacggtctcactctgtcacccagcaggagtgcaggggcacaatcttagctcactgcatcctctgcctcctgggctcaagccatcctcctacctcagcctccaaagtagctgggagaacaggtgtgtgccaccacgcctggctaattttttaatttttttatagagtcggggttttgccatattgcccaggctggtcttgaactcctgggctcaagcaatttgcatgcctgggcctcccaaagtgctggattacaggtgtgagccactgcacctggcccatttttcttcattcttttacttttctgttcttcaggctagacaatctctatgtcctatcttcaagttcactgactgtttctcctatcagctcaaatatgctgttgaacccccctaataattttttatttcagttattttatttttcaactccagaatttctatattttaacagtctgcctttttattagtattcactactggataagtcactattatgatatttccttttaattcttcagacatggtttcctttagttctttgaacatatttgcaaaattgatttaaaagataaatgtttgatagaatgaataaatgaacaaatacatgaacatacaaagaaataaatgaggccaggggtggtggctcatgcctgcaatcccggcattttgggaggctgaggtgggtggattgcttgagctcaggagttcaaaaccagcctgggcaacatggcaagacccccatctctacagaaaaagatacaaaattaacagggcatggtggcatacacctgtagtcccagctactcaggaggctgaggtaggaggatggcttgagcctaggaggcagaggttgcagtgagttgacatcatgctactgctctccactgcaacagaacaagacactgtctcaaaaaaaaaaaaaaaaaggaaatgaaaaactccatgcatgcatgcacatatgcacaaataaatgagtgtgtaagcaggtgaataagcaaactaatgaatgacatttcccgccttcttgaccacttccaggaattcagctagatggagaggaggaggaaccagaggaagagaccaccctgggcagccgcctcatgagcctgttggagaaagtgcggctggtgaagaagaaggaagagaaacctgaggaggagcggtcagcagaggagagcaaaccccgtgaggactggggtcactggggagagggcaggggtggggtgggtagccccatgcctgcggagcctctgggtcccaaagagggcatgaggacagatgcaagggaggggtagataggcaggagtgagaggggaagagtggcgggcaaagtggaagcaggcgtggtggctcacgcctgtaatcccagcactttgggaggctgaggcgggtggatcacttgaggtcaggatttggagaccagcccggccaacatggtgaaacccccttctccactaaaaatacaaaaattagctgggtgtggcggtgcatgcctgtaatcccagctacttggagactgaggcacgagaattgcttgaatgcaggaggtgggggttgcagtgagcccagattgcgccactgcactccagcctgggtgacagagcgagactctgtctcaaaaaaaaaacaaaaacaaagatgcatgctggaggtttgcctccagagatgggggctgtagaacgtgtgtgttggaccagggtgacacagcctaccagcttagtggcaaacctctaactaagggatggcggtaaccctgaaccactgtggcttccgtggccttggggcttctcttttctttcttgatgagaggattaccatgctgagggattagacaagcagctatcattaatgttgggccaatgtgttattttgcaaactgtatattagccacatctaacaaggacagatttcctgacgttggtacaggttttatcccacaacattcaggaaacttttatggggccaactatgggccaggcactgttaccagggctgggaaatacagccgaggggggaaagtcaaagcccctgcccacgagtttagattttttctttttctttttcgtttttttttttttttttgaggcagggtctcactgcgtcgcccaggctagatagagtgcagtggcgcgatcttggctcactgcaacctccgcctcctgggttcaagcgattctcctgcttcagcctccagagtagctgggactacaggcgcgcagcaccatgcctggctaatttttgtatttttagtagagacggggcttcaccatgttggccaggctggtctcaaactcctgacctcaggtgatccacccgcctcagcctcccaaagtgcagggattacggctgtgagccaccgcacccagccaaatccacagtatttttatagaacaagtgggattgtgacatgtgccttcaaaggtgcatggcgaagtgcttctggtcggctctggtatcttgcagttgtacagtttattattcctattgaaatttttaggaagcccttgtgggctggatattagggtgaacagaacagagagattcttgggcgaatagaaaaaagtttgccaggctgggcacagtggctcacacctataaccctagccctttgggaggccacagtaggaggatcacttgagcccgggagttcgaggctgaagtgagctgtgatagccccacagcaccctagcctgggcaacagagcaagacactgtctctaaaagaaaaaaaggaaaacaatctgctagaatctgcctgctcccagcaggtggagggcgcaggtggtagtaactgggaaaacttctggaacagggggccccttccacattgttctggtccaaggccccatgtgccgacctgccctgcatggtgctccaagccttgcattgtctccttcccagggtccctgcaggagctggtgtcccacatggtggtgcgctgggcccaagaggacttcgtgcagagccccgagctggtgcgggccatgttcagcctcctgcaccggcagtacgacgggctgggtgagctgctgcgtgccctgccgcgggcgtacaccatctcaccgtcctccgtggaagacaccatgagcctgctcgagtgcctcggccagatccgctcgctgctcatcgtgcagatgggcccccaggaggagaacctcatgatccagagcatcgggtgagacaccgcccttcccccttactttgcatatccccttgggtaatgaataccctcaggatacaataacattcccttccccaacttctggcccatcctctgggtgatctcagtctctcgatggctagctcacctcctgggtaatgtctccttcccttacctctccgccctcagtggtagcagctccgcttctgtgtgactctcagcaggacattccccacccccccctttttttttttttttgtgagactgagtctcactctgtcacccaggctggagtgcaatggcgcaatctcagctcactgcaacctccgcctcccaggttcaagcaattctcctgtctcagcctcccaagtagctgggattacaggcacgcaccaccataccaggctaattttttatatttagtagagacagggtttcaccatgttgatcagactagtctcgaactcctaacctcaggtgatccacccgcctcggcctcccaaagtgctgggattagagacgtgagccaccacacccagctgaggtttaccctttttgagcttcagtttcctcatctgtaaaaccggggagagccaagcctactctgaagggttgtgctgtggcttcagtgagctcatgcgaataataataattatggtagcagtattgagcactcattgtcaaataaatctcattcacacagtaaacatttattaagcacctacttcgtgccaggcatttctaggtgtttttgagacagggcctcactctgttgcccaggctagagtgcagtggcccaatcacagctcactgcagcctcaacttcctgggctcaagcgatcctcctgcctcagtctcctgagtagctgggactacagacacacaccaccatacccagctaatttgtaaatttttttgtagaggtagggtcttgctatgttgcccaggctggtcttggactcctgggctcaagtgatcctcctgccttggcctcccaaagggctggaattacaaggcaaaagccaccatgctgggacaacatttgacaaagggcaacatggcaaagatctctgccctagaggagcctgccttgggtgcacgcctcagtctccttatgagggaaacagggacccttcctcccacagtggctgtaggaattttttttttttattttttgagatggagtcttgctctgttgccaagcctggagtgcgcaatgtctgctcactgcaacctccgcataccgggttcaagcgattctcccacctcagcctcctgcgtagctgggattacgggtatgcgccaccacgcctggctaatttttgtatttttagtagaaatggggtttcaccatgttggccaggctgatctcgatctcctgacctcaagtgatcctctagcttcggcctcccaaagtgctgggattacacgcatgagccaccgcacccggccagctgtaggaattgagtgagttcagatctgtaaaggcggtggtgctaggcacagagtgagagggtcaagaatgccaacgctgtcacagtggtggctatggccctctccggacctgggcccctggtgaccccgcacactctgcccgtgcacaggaacatcatgaacaacaaagtcttctaccaacacccgaacctgatgagggcgctgggcatgcacgagacggtcatggaggtcatggtcaacgtcctcgggggcggcgagtccaaggtgagggcccaggcaggtgctggggagctcaggggaggcagccacagagggcaggccctgaccaccctgcctgtcccaggagatccgcttccccaagatggtgacaagctgctgccgcttcctctgctatttctgccgaatcagccggcagaaccagcgctccatgtttgaccacctgagctacctgctggagaacagtggcatcggcctgggtgagaacccccgagcccaggggctgtcccccagaacccactcctggcaccccgtccaggcctgccccactttccaccagctcactcattcaacaaacactccctctcaactgtggttctggccctgtaatgagtaatgctggggacacaatagtgaccccaatagtgacagcccagagtggtcagagcttggatgagggaagtacagaccagaggaggcacctgatccaggctggaaaaagggtggtcagggagggcttcccagaggaggcgagacaagcaggagtgagatgttctccccacctctcgcccctgcaggcatgcagggctccacgcccctggacgtggctgctgcctccgtcattgacaacaatgagctggccttggcattgcaggagcaggacctggaaaaggtgtggagggcagggctgggccccaggcctaagggaggaaatcgggccgctacccggctgcttgggacacctgctgattccaaactcattctggggggcaattctggatggtccagtgcccaaccagaaggagactaatttgcagggagagaacggcacccagttgttcattcatgggatgcttcctggctgtgggccggtccgcactccacgcttcccgtctgggggcaggtccacagtctacgcttccgggatgggggcggatccgcactctaacttccaggctgggggcggatccgcagtctacacttccgggctgggggcggatccgcacgctacgcttccgggttgggggccgatccacagtctaggcttccagccaggtggccttggcacatttcttcgctctccgagcttccacttctgtgtacagtggtgaaatgcgtgggctccagacttcagcaactttgcttctgctcccctcgctccctggctgtgtggccttggataagtgacttagactctccagacccctgttgtctcatctgtacaatgaatgtagtcatagaaacgacttcatggagtcattctgaggattaaatgaattaatccagtaaagtgtttgtaaaggggcagtcagtaacgttagctgctgttatattatcattcaacaaatatgtagtgttagcttaccatatgcaaagcagtagcaatatgacagtcaaaaatccctgtctggccaggcaaagtggcttacatctataatcccagcactttgggaggccgaggcaggaggatcacttaagctcaggagtttaagaccagcctggacaatatagggacaccttgtctctacaaaaaatacaaaaagtaggtgggtgtagtggcacgtaactgtagtcccagctactcaggaggctaaggtgggaggatttgatagagcctgcgaggctgaggctgcagtgagctatggtcacaccactgcacttcacctcagggacagagcgagaccccttaaaaaaaaaagtggccagagaaagcctcattgagaaagtgacatttgtgtaaagctctgaaggaaggtgacaggtcaggtggtcatcatggggaagagcattctaggcagcgggaacagccagtgcaaaggccctgaggcaggagcaaacctcataagctggaggaacagcagaaagacagctgtggctggagcagaggtagtgagggtgagggcaggaggtgacaggtgggtcatgtggcatctcatcggtcacaacaagggctctggcttttaccctgagtgagaggaggccaggattctgagcagaggagggacgtgacctgactcaggtgttcacagggtccctctggctgtgtgtggggaacagattgaggggaaggcagaaggacagaaggacagggaggaggctcgtgttgtggtccaggtgggagacaagggtggacagaaccgctacaggaaaggggtctggatccaggcccaaagagaaggttcttggatctcatgtaagaaagaattcagggcaactccatagagtaaagtgaaagcaagtttattaggaaagtaaaggaataaaagaatggctaatccatagacagagcagccccaagggctgctggttgcccatttttatgttatttcttgatgatatgctgtttagcataacaaggggtggattattcatgcctcccctttctaaaccatgtagggtaactttctgatattgccatgacatttgtaaactgtcgtggcgctggtgggagtgcagcagtgaggatgaccagaggtcactctcgttgccatcttggttttggtgggttttggccggcttctttactgcagcctattttatcagcaaggactttatgacctgtatcttgtgccaaccttctatcttgttctgtgacttagaatgccttaaccatctgggaatgcagcccagtaggtctcaagctcctgttcaagatggagttgctgtagtttacaggcctctgacaggaccagggctaatgggccgagggatcagagctgaaccggactgaggagccgcagggcagggcagggcagggcagagggctgagccccaggaggaaggtggcatgggtctggtctctgactgagccccttctgcccccaggttgtgtcctacctggcaggctgtggcctccagagctgccccatgcttgtggccaaagggtacccagacattggctggaacccctgtggtggagagcgctacctggacttcctgcgctttgctgtcttcgtcaacggtgaggagggggtggcagtggcagagcgggaagtatggagtcactggtcacacacctccctcgagatgactgctcgcaccctgagccacagatggggtccaggcaggaatcccttccagcaggcctggggctggcaggggcctgtgttacccctggaggtgttgggtcctgtggctggcagtgttggatcctggggctggcgggagcctggtgttacccctagaggtgttgggtcctggggctggcaggggcctggtgttacctctggaggtgttgggtcctggagctggatgggacctgtgttacccctggaggtgttgggtcctggggctgcatggggaggtctctgatggtggctcatgagaccccctttccccatgcgggtggccaggcgagagcgtggaggagaacgccaatgtggtggtgcggctgctcatccggaagcctgagtgcttcggacccgccctgcggggtgagggtggctcagggctgctggctgccatcgaagaggccatccgcatctccgaggaccctgcgagggatggcccaggcatccgcagggaccggcggcgcgagcagtgagtctcccggccccctcctcaatagggcaacccgccctccctggcccctggctgcctccccaacccacccaccttccctgcagctttggtgaggaaccgcctgaagaaaaccgggtgcacctgggacacgccatcatgtccttctatgccgccttgatcgacctgctcggacgctgtgcaccagagatgcatgtgagaccctgagccagggcaggatgggaagggagggcaggcacagccgctttgaacgcctcatgcaggcactcggtgacacggagtgagctcccatatgtgggtggtcctggactagcaatgttggggacacaacagtgaccaagacagccccagggcctggtctcacagagctcccagtccaatgggggagacggacagtgacacccagagtggtcagggctgggatgggggagcacaggaagaggggtcggggctgggattgcagggcacacggagaggactcaggatggggatggggaacacagggagaggggtcaggatggggatggggtcacagggataggggtcggggccaggatgaggggtcgcagggagaggggtcaggatgaggttggggggaacaaggagagaggtcgggactggggtgggggggcacaggcagaggaacgagggctggaaactctagacagcctcctgagaaagaggcctgctctaccctcctgtgtggtaagggagggagcagagcagtcactgagtggggcaccagcgcctgatgagtgcccctctccctccctctactccccagctaatccaagccggcaagggtgaggccctgcggatccgcgccatcctccgctcccttgtgcccttggaggaccttgtgggcatcatcagcctcccactgcagattcccaccctgggcaaaggtgcagaggggatggaacttggcgaaggagtgatgctggggagggagcggctgggtccgcagggcatccccgaacccaccctccctgcctgcagatggggctctggtgcagccaaagatgtcagcatccttcgtgccggaccacaaggcgtccatggtgctcttcctggaccgtgtgtatggcatcgagaaccaggacttcttgctgcacgtgctggacgtggggttcctgcccgacatgagggcagccgcctcgctggacacggtgagcaaccctgcccagcctggccaccctccccacttccacagagggacaggagatgggtcacggtagagcagcagcagctgcttttgtttttcttgggattgtggacatatcataatccccaataccatcatcaagatagaaaatgaaaacgaagaaacactgaattccgatgaagggtgagtaggaatctccaagacctccagttataagaaatcatcatttgaggtcaggcgtggtgactcgcgcctgtaatcccagcactttggggagccgaggcgagcggatcacaaggtcaggagttcgagaccagcctgaccaacatggtgaaaccgcatctctactaaaagtacaaaaattagccagacgtggtggcgcacacttgtaatcccagctactcaggaggctgaggcaggagaatcacttgaaccggggaggcggaggttgcagtgagccgagatcgtgccgctgcactcccgcctggcaatggagcgagactccatctcaaaaaaaatattttgttcgcagtattggtttggtactgtgggcacacagaactctgtacaggaacagcaataacagaagggtgacagggcaaggaagatgagcactgagaagtgaccaccgatttggcaaagtcaaggtcactggaaatggggatgagcagtttcagcaggggacagaagccttccgagagggggtttaagagagcctggggctgtgcatggtggctcacccctgtaataactttgggaggccgaggcgggtgggttgcttgaagccaggattttgagaccagcctgggcaacatggagagatcctgtctctacaaaaaaaatttaaatattagctgggcatggtgctgcacacctgtagtcccctctactagagaggctgaggtgggagaatcacttgagggacagacattgaggctgcagtgaaccatgattacatctctgcattccagcctgggcgacagagcgagaccttatctcagaaaaaaaaaagaaaaataaattagccaggcatggaggtgcgtccctgtagtcctagctactagggaggctgaggcaggaggatcacttgagcccaggaattcgaggctgcagggagctatgattgcaccactgcactccagcctgggcgacagagacccctgtctctaacagatgaaaaagaatgtattacaggaagaaagatgagggttagagaggagataagcgtgcagaccattgatatttacagaagagccaaatctgtaatggggttcattaatctcatcgaccagttgtgtgtgtttgaaattttgcataatccaaagtagtaagtggtggggtgggggctgtgggcataggggtgtgggcatagggtgggaggagggtggtagagattgggaggagcaggttttgggggagtcatcagaagcttggatcctttggccacagtcgctcaagacaggtgccagagcagccccaggggtgtgcagcgggcctgatgtcctcaccctgcgccctaggccactttcagcaccaccgagatggcgctggcgctgaaccgctacctgtgcctggccgtgctgccgctcatcaccaagtgtgcgccgctctttgcgggcacagaacaccgcgccatcatggtggactctatgctgcataccgtgtaccgcctgtctcggggtcgttcgctcaccaaggcgcagcgtgacgtcatcgaggactgcctcatgtcgctctgcaggtggagcggggcaggcttcagggtggggcaggggcaggggcaggggcaggggcaggggcaggggcaggggcaggggcagggggaggagcaggggcaggggcagcagagcgggcctggacgggggattctacatcttgtgcattgtcccgcaggtacatccgcccgtcgatgctgcagcacctgttgcgccgcctggtgttcgacgtgcccatcctcaacgagttcgccaagatgccactcaaggtgagggcaagcgctctttagcatctcatttccaggccgcacccactggtttgctcttccctcctactgcggggctcatttgtgtcggcactgcccagcccaataaacctgcactagttagggcagcgtccccgtagaaatctcttagcatccttatttgcatactaggattcccagaacattcactttgcttcattgatgcctctagcgttccctaattagcatttaatttgcttaacagtgagccagcccccgcttcaattagcatatatttgcatggagcacaccactttccctaattagcatgtttatttgcatgcctggaccaccagacttccactattcaaatgagtgcatttatttgaataaacattatcacagctattctgaatatttgcacactgtctctcttattttttcatttgcatgctaatttgcataaagagatacccccaactcagatattttgactattttgcataatacatcgaaatcagctcctatttcaaatttgcattttagccaggcgcggtggctcacgcctgtaatcccagcactttgggaggccgaggtgggcagatcacttgaggtcaggagttcgagaccagcctggccaacatggcgaaaccccatctctactaaaactacaaaaataagccaggcatagtggagcacgcctgtaatcccagctactctggaggctgaggctggagaatttcttgaacctgggaggcggaggttgcagtgagccgagatcgtgccactgcactccagcctggtcaagagagtgagactccacctcaaaaaaaaaaaaaaaatttgcattttggatagtggaggccctcttcccaattaccatatatttgcatggggtgcagcctttgtttctacttggtatgttaatttacataagcacagattgctgcatccatatgcccatttactcactacatacccatggattaatattagcacgcttatttgtgtaaagcaataccagacacaaccagctctagtttaatgcccattttaactctaaattaagaatgctaaatttgcatactaagctgtctaggaccactcctcaataaacataccatttcttcccttattagcatatcatttgcataacccacacctccttcataatttaaaagcactggcatgcctgtgtctctctgggccttcgtctgcctgccattcgctggtgcccccctcatttgtgtgtccccctcttgttcccacccagctcctcaccaaccactatgagcgctgttggaagtactactgcctacccacgggctgggccaacttcggggtcacctcagaggaggagctgcacctcacacggaaactcttctggggcatctttgactctctggcccataaggtctgggcagcagggagccccaaaatggcctatgtggagggtttggggcccaaaattgggggtccagagtgaaatccctcaattttggggggttcaaggaggagaaggttctgcaagtttggatctaggaggatctatgggttgaggcttcgatttggaggttatgaaagagggggtggacctctagtttgggagcttggagagggcaatatggggatgatttgagcatacaattgggactgacatttgggtttcaaggagagggaccataattcaggtttggggttcagggaggagggctgatgattgcagtgtgtgagtttgaggtcctgggggtcagtaaggcttatagcgacctcctacccctgcttcacccggttttcccagaaatacgacccggagctgtaccgcatggccatgccttgtctgtgcgccattgccggggctctgccccccgactatgtggatgcctcatactcatctaaggcagagaaaaaggccacagtggatgctgaaggcaactttgatccccggcctgtggagaccctcaagtgaggcctgggggctgggagacagagaggaagatttcaggggtggagggaaccccagctccaacatctgctgaccctgtgcccccaacagtgtgatcatcccggagaagctggactccttcattaacaagtttgcggagtacacacacgagaagtgggccttcgacaaggttggcctcagggtcctcctatccaagaaaccctcaagaccccagctttccccccgacctggttcttccctgaggccccagatctccctgagaccccccagccttccctaagacccttagcttgttctgggacccccccaggattctctgtcctcggctcctccagggtcgccccgtgtgtccccaactgctgcctccccctcaccctgcctcccctccatctctagatccagaacaactggtcctatggagagaacatagacgaggagctgaagacccaccccatgctgaggccctacaagaccttttcagagaaggtgaccaggccttggggcccagcattgagggtcaaaatgaaacccccaaatttgaggattcggggaggagtgaggcaatttcacatgtttgcatctaggtggatctgtgggttaggtctccccattcatggactttgccttctctcaaacttggtagagtgggtagagactccgagagagtgggtttgattccttggctgtagtaagacttctcggagactcaagtgtctaatgggataaggagattgggtttgggaggctctgttacagagcaggtaagagacttgagttggaatccagactggaccattgcctagccacatggtcagggttttctcctttggggtccttcctccacccctctctcatcccattccaccaactccccaccctcctgtccaccccaggacaaagagatttaccgctggcccatcaaggagtccctgaaggccatgattgcctgggaatggacgatagagaaggccagggagggtgaggaggagaagacggaaaagaaaaaaacgcggaagatatcacaaagtgcccaggtgaaggcggggcctgggtggagggcaggggcacgatggggggagggtctagaacaaggggcatggccagacagggaagggatggagaggagaggggcccagggaggtaggtggggcaagaggggtgcagaaacctgagatctgggaaaggagagggcaggggtctgaagaactgcaaagggcagaggagagaaggatggggtggtttagagacagggccttaaggaaaggacaaggggtcttgagccaggggagggtggagggggtagaatggactagtggggcctggggaggggctggcctgggcttcctgctagcccatcagcccacctcccatcttccccttgtcctctcagacctatgatcctcgagaaggctacaaccctcagccccccgaccttagtgctgttaccctgtcccgggagctgcaggtgagagccctgatccttttggggggacatagggtgtctttgggggggctggcatcctctgaatctagcccttgactctgcatccactcccaggccatggcagaacaactggcagaaaattaccacaacacgtggggacggaagaagaagcaggagctggaagccaaaggtgagggcgcccatgccgcccccacgctacccccgtggattcaccgtgtggttttgctgattgccttcatgcccctgaaactcggtttctccatctgtagatgggaataataacagcgtttaccaccatggggtaatgagatgagcaccagcaagcaatgtttccgttattcgtatcttctttatcaccataattacgcatgccgggcactgcaggaaccacttcagtgagagtggcccgggtcttccccagagccctgatttctggtctttgcctccccaggcggtgggacccaccccctgctggtcccctacgacacgctcacggccaaggagaaggcacgagatcgagagaaggcccaggagctactgaaattcctgcagatgaatggctacgcggttacaaggcacgcgggttggggctcccgcggaagagcagcaggcagaacacacccggcaaaggctggaaggggcggggccagagaggggtggagccgagaggaacggggcctgaggagcaaagatggaaccagaggggaggagctaagggagtggggcctggacacagaggcggggccagatggggaggagttcgaaatgggcggggcttaagcacaggcgggaccagagaggagaggaggaagagaagggcggggcccagggagcagaggcggggccagagagtggaggagactgagaggggcggggaccggtgattggaggcgggaccaaagaggagagaaggctgaaaagggtggggcccggggaacagaggtagggccaaagaggaagaggctgagaggggcgggggctggggagcacaggcggggccagagaggggtggggaggtacagaggggcggggactggtgagtggaggcgggaccaaagaggagagaagggctgagaagggcagggcccggggaacagaggtggggccaaaggggaggaggctgagaggggccggccctggggaacagaggtggggccagagaggggagaaggctaagtggggtggggcatgggggactcagagtggagccccaacctggggtgaagccaaagctgatagagacggggccagcaggagcagaggcggacctgagaagggtgggaaactgtagggccggcgtctgggctgatccttctctccacatctccatgcagaggccttaaggacatggaactggactcgtcttccattgaaaagcggtttgcctttggcttcctgcagcagctgctgcgctggatggacatttctcaggagttcattgcccacctgggtacggagaaataccccccgcttatgcccgccccacctgcagacaccagttctgcagaccagactcacctaggacacctgttcatgcactcaatccgtcctccccttatctgatgtttattgagcttctactatgtgccagacactgttctagatgctggggtacagcagtgaagatgacaaatgacccctgctctcctgcaactactcctatgttggattcaggcaattagcatcataaataactaaatcgtttagtgttagaaggtgatcagtgttatgggaagaagaaaacaatagagccaggtagaggggattgggagtgtggagccagttgtaattttattttatttcattttattttatttttattttttattttatttatttatttatttttgagacagagtttcgatcttgctgcccaggctggagtgcagtggcacggtctcggctcactgcaacctctgctttctggtttcaagcgattctcctgcctcagcctcctgagtagctgggaccacaggcacgggcgccgccacacccagctaattttttgtattttttagtagagacggggtttcaccatgttggccaggatggtctcgatctctcgacctcgtgatctgccgcctcggcctcccaaagtgctgggattaaaggcgtgagccaccgcacccggcttgccagttgtaattttaaatagggtgttccagaaagactttgatgagaatgtgatatctgaggcaagccatgaaggaggtcagagaggagctgtgtggacctctgggggcatctgttccttgcaggcaaaggaacagcgagtgcaaaggccctgagaggtccctggtgtgagtgtcaggatgccctgtagctgaagcagagtcatcgagggggacggtgagataaacgaggtcacagaggtgactggggcagatcatgcagggctttgcaagctgtgatgaggactttgaccttacctggaatgagatggagttgggggttgggggctgagccgaggagggacgtgatccataattctggtgttcacagggtccctctggcttgactggggtggggacaggagccgaaaagggtgagaactgggcagatttctggatctattttgaaggctgaggctgctggggtgccccccagtgcctcttacaggccactaagaattacagctaggccctacaatcccctccagtttcccttagagaccccccccagcattccccttgagagctaccctcaggaacccccaaattccctccaggtgagtggcagagcaggattcgctgtcacgtctcacctcaaagcctgcctgctgagcttcagtgctgcacatccccctgacaattcccttccctctctagacctcagtttcctcacctgtgatatgggcatatgttcaccataactagccatggttctgttacttactgggtgacctggggttagttacttcacctgagtttcctcatctgaaaaatgggggttgggaaccaactgcacagacctccaagttgtaaggagactgtgtgaggatgacatgtctcacagtgccaaggacatagcaagtgtttaataattggagccagtattattattattattattattttttttttttttttttttgagacggagtcttgctctgtcacccaggttggactgcagtggcgcgatctcagctcactgcaggctccgcctccagattcacgccattctcctgcctcagcctcccgagtagctgggactacaggcgcctgccaccatgcccggttaattttttgtgtttgtatttttagtagagatggggtttcaccatgttggccaggatggtctcgatctcctgacctcgtgatccacccgcctcggcttcccaaagtgctgggattacaggcgtgagccactgcgcccggcccagtattattattttaatagtatcagttatgactgtcaccattattattgtttgaaatttatttccattttgaaattaactctaatttgtttacattgacttcttgtttcatttggttcattcattcatttattgcagattaactcagtgccatgtattcaagtttagaatgaaaagcacttatggtgggtgaggaagggcatgttccatgaccttaacccattccagtttgttttccccattgtcagcttcagaaagggtttgatcaaggagttgtcagcttcaagaaggatttgatcaagaagttgggggaaagcacattgggaggttgaggcgggtggatcacctgaggtcagaagtttgagaccagcctggacaacatggtgaaaccttggctgtactaaaaatacaaaaattagcttggtgtgtgggagcatgtctgtaatcccagctacttgggaggctgagtcaggagaatcgcttgaactcaggaggcagagagtgcagtgagccgagatcgtgccattgcactcctgtctgggtgacaagaaaaaaaaaaggagttgggggaatcagatgaaagataggagaaaggtttatctcaaagccaacacaaatgacttcataccaatactttatcccccatcatttcccaactctgctcccagcatccttcccatcagaacaccctgggttccccagccttgaacccactgtgaaccctatttgccctccctacagaggctgtggtcagcagtgggcgagtggaaaagtccccacatgaacaggagattaaattctttgccaaggtgagaggtgggcttagaagctggagggcgctggggactcataggctctccccacccctcattggaccctttatctcccccaacccgtctccagatcctgctccctttgatcaaccagtacttcaccaaccactgcctctatttcttgtccactccggctaaagtgctgggcagcggtggccacgcctctaacaaggagaaggaaatgatcaccaggtgggccgcctgtgaccctggacccagccccctgacctcacaggattgtaatcctttgcccatggaggctctgtcctgggtgctgggtgttgggtactgaccgtctcctgcaaaggcgattgaagggtgaccagccatcctagtgtacccgggactgaagggtttcccaggatgtgggactctcaggcaacttgggacaaatcgatcaccctgtccaggaaggccaactcaaggccgggcgtggtggctcatgcctgtaattccaacactttgggaagctgaggtgggaagatcacttgaagccaggagtttgaggccagcctgggcaacatactgagaccccatttctacaaaaaatacaaaaattagccgggcttggtggtgcatgcctgtagtcccagctactcaggaggctgaggcgggaggatcacttgaacccaggagttggaggctgcagggagctgggatcgtgccactgtactccagcctgggtgacagagcaagaccctgtctaaaaaaaataaacaaacaaagaataataagaaaggctgactcacccctcacctccccagcatcccagttactgcctgtgacattccagcttgcccatctctctgccccttcccatccctcctgtctccatcatttggaccccctcctggttcctctctccttgtcttctctgtccctgtctcctctaattgggtcacgctgtcctcgtctccttggcctcctcactcgctgtttctcctgccttctgtccctttctctttcttcagcctcttctgcaaacttgctgctctcgtccgccaccgagtctctctctttggtaagtggctccacaccttcggtcttcctccctaatctttctcttccccaccctgaagaaatagctcccaggttctgccttaatttgaacaacctttgttgttttcttcccctggacctggagacatggaccaggtatccggggggtagggcagtgactgagatgccctgggcctgccctcaatggagctcccaggccagtgggagagacagacctatctccagacaaggacagcccagtggggtcagggctgggcaggaggaaggccaggagagtggttgggctggggaggagggacatttggaggcgctgtaggagtctgggggggtgggggtgcagtagcattccaacttagcccgcaggtagcctcaggaagagagcggttggggtggatgtagagggaggcactgtcctctgtcctcttagccatggcatccccccggcccatcttcctctcccagggacagacgccccagctgtggtcaactgtcttcacatcctggcccgctccctggatgccaggtagggccataggcagtggcgcccactcccaccatcatcgggcccccaccccaacccctggtctcctagactctccgattccagagctgatgttcccccgctgcccttctaggacagtgatgaagtcaggccctgagatcgtgaaggctggcctccgctccttcttcgagagtgcctcggaggacatcgagaagatggtggagaacctgcggctgggcaaggtgtcgcaggcgcgcacccaggtgaaaggcgtgggccagaacctcacctacaccactgtggcactgctgccggtcctcaccaccctcttccagcacatcgcccagcaccagttcggagatgacgtcatccgtaagggcgcctgacccaagggcaggttgcggggagtcagtgtggccaacaccacccatccgggtgcctgtgagagtccctgggtgtttgaatgtgtggatttcttgctgtaagcaaagcatgcagtcagtaccttggcaggtggcaaatgagttaatgaggacgcgagctcagcagctctaacaaaagaccctaagtggactggcgcagtgactcacacctgtaattccagcactttgggaggctgaggcaggaggaccgcttgagctcaggagttcaagaccagcttgggcaacatagcgagaccctgtctctactaaaaaaaaaaagaaaaatttaaagattagccaggcatggaggcacatgcctgtaatcccagctactggggaggctgacaagggaggatcacttgagtccaagagttggaggctgcaatgagctatgatcataccactgcactccagcctggacaacagagcaaaattctgtctctaaaataaataaataataaaatagggtccttgatgttaaaaaagagagtctattgataaaggttaggaaaagtagcacttggccgagcgcagtggctcacgcctgtaatcccagcactttgggaggccaaggcggacagatcacctgagctcaggagttcaagaccagcctggccaacatgatgaaaccttgtctctactaaaatacaaaaattagccgggcatggtggtggtcgcctataatcctagctacctgggaggctgaggcaggagaattgcttgaacccaggaggcgaaggttgcagtgcaccaagatcgtgccattgcacgccagcctgggcaacagagcgagactccatctcaaaaagaaaagaaaagtagcagttggtggccagccacagtgactcatatctgtaattccagcactttgggaggccaaggtaggaagatctcttgagcccaggatttcaagaccaacctgggcaacatagcaaaaccccatcttaaaaaaaagaagaaaagaaaagtagcacctggatagggttcttctcccatccaactttgtattttgaaattttcaaaacatacaggaaggtagaaagaagaaaattgttggcggggcatggtggctcacgcctgtagtcccagctacttgggaggctgaggcacaagaactgcttgaatctgggaggtggaggttgcagtgagctgagattgcaccactgcactccagcttgggcgacagagcaagactccatctcaaaaaaaaaaaaagaaaattgttaacaatttgccctgtgtgcctacccttcactgtatggttgaaagtatttagttttttttgttgaacttttgggtgtaagttgcacacaccagggtaacctcatcccttaatgttcatcagctggctttcctagaataggaaccttctcttgtgtaaccacggtatcattatcatacctaacctaaccatatttaaatttccctcattacccacaaaatgtctttgatttttttaaaagaaattcagaatccagtcaagtttctcctgctgcatttggtggttgtgtctctgtagtgtctttaaagtctagaatagccccgccctctttttgcctcatgatgagcttcttaacttggccttctggagggcatgtggttaacctaaaattggtctgggcacagtggctcgcacctgtaatcccagcactttgggaggccgaggtgggcaaatcacttgagaccaggagtttgagatcagcctgggcaacatactgagaccccatctctaaaaaaatttttttttaattttttttttttttttgagacagagtctcggtctgtcacccaggctggagtgcagtggcgcaatctcagctcactgcaacctctgcctcccgggttcaagtgattctcctgcctcagccccccgagtagctgggattacaggcattcaccaacacactcagataatttttgtatttttagtagagatggggtttcaccatgttgcccaggctggtctcgaactcctgacctcaggtgatccgtccacctcagcctccaaagtgctgggattacaggcatgagcctctgcgccaaccctaaaaatatatacattttaaataaaatgaaaaagatagcctaaaattgcagcaatattgcagttctgtttgcatttttctggaggaagtacccctcactttcattatagagggccatgagtcctctccacggaagaaacaacatctagcctttattgagtgcctactgtgtgccccgttctagtggctttccaagtagtaactcatttgatactcacgaccaccccgtgaggaaggtactataactatccccatgttacaggtagggaagctgaggctgagagagagttggtaacttgctcaagtcacaagactcgtacatggaaggctggctgtacatctgcttgctcttccccactgcatgggcctatttgagacaagggaggtggggtggggagggcttgtcttgtgagcgcatgccgcagcctcgccccctgtctccctcagtggacgacgtccaggtctcttgctaccgaacgctgtgcagtatctactccctgggaaccaccaagaacacttatgtggaaaagtaaggagagggagccatcgtttggggctgggtggggctggaggggaagggagggagcaggggaagaagatggggtgggtgaaaagcagggtagatgttaagaattttcccgcacacggcggcagccgcggttccccacggcggccgcgtgagggcgctcagggacaggtcagccacggaggtagagccgccaggtctggggctgtgaagcaggcaggcctcgctggggaagaaagggaggcgcagaccacgggggctgcacacaggagccacgcaacactggggtcactggggagggcccctggcagtggccatgtgaccgcttctgagctgagattactgatacagcaagagcgaggctgcggctgtttccaccagctctgaagttattcagatttcaagtgacaccagcggtgcgcggtggctcacacctgtgagcactttgggaggctgaggcgggaagatcacttgagctcaggagtttgagaccagcctgggcaacatagtgagactccatctctacaaaaaaaaattttttttaattagcctggtgtggtgtggtgtagtggcgctggtgcctgtaaatccacctactcctaaggctgagatggggggatcgcttgagctccagcctgagcagcatagggagactgcatctctacaaaaacgactttttttaaaactagctaggcatggtatggtgtgtgcctgtaatcccagcgactcaggaggctgaggtgggaggatcacttgaacccaggaatgtgaggttgctgtgagccaagatcaggccactgcactgcagcctgagtaacagagcgagaccctgtcttaaaaaacaaaacaagtggcacacatggatgaatggcagctctgtcccaaagggttctgggaggagccgtttctatggagatggggctgggacccaggaccccaaagagggggacacgtggcagctaaacacagccccgtcttccaggcttcggccagccctcggggagtgcctggcccgtctggcagcagccatgccggtggcgttcctggagccgcagctgaacgagtacaacgcctgctccgtgtacaccaccaagtctccgcgggagcgggccagtaagctgtgtggggcgggagcagtgctgggagtccaaatctccccagcacagggccttggggagaccctaatttgggggtagtgtggctgggctgggctgtgagcggctgaggattccccaggttgggagtgccacacattcaggaaccccagagtttatggttcgggggcatttcaaggccgttacatggggagaatttagagattaatttgatttttgaaaacagaatctattgataaaagttaagaaaagtagcacttggtggccaggcgcagtgggtcacgcctgtaatcccagtactttgggaggccaaggtaggaggattgcttgagtccaggagttcaagaccaacctgggcaacatagcaaaaccccatccatggaatttggagctatggaatttattttagtgatggtgacatttgagggcatcatcaagcttggagacatagggtgaggggtatttgagcataagaggattgagggaaggcagggttcattcattcattcagcaaatatgtatcgagcagttactatgtatgaggcgctgtcctagtcacctgaggttcagcagtgaacagataaaacagacaaaaatcccctgagtcctgggtccagaggctagaatgaggtgtggacctgggggaaatatacgctccaaggcaggaaacttgtcttcttggtcagctgttctcccagaatggcacctggcccagagtcagcaagtgagcaagtgacaggttgtcggtttcaagggactgaaccgggtgtgggattcagagagacaaggcggggagacagggtggggttggaaaaggtctcttttggagtatgctgtacagcaggggtgaggggaatgggcttgggatgtgggagattttaggagggaaggtttctaggggtgagattttagggagcagacaggctcgggggtgtgaagtgtttgcggggccactgagtttcaatgtgagggttgggagaggtagttgggttggagggtgagatgggaagaatagggtttgggagactgtttaaggggggtggcaattcaatggtgtctgatgtattgcgggggaggccagggcactgaggtctgggggtgatggcttgacattccctgcccccgtccctgtaccccagtcctggggctccccaacagtgtggaggagatgtgtcccgacatcccggtgctggagcggctcatggcagacattggggggctggccgagtcaggtgcccgctacacagagatgccgcatgtcatcgagatcacgctgcccatgctatgcagctacctgccccgatggtgggagcgcgggcccgaggcacccccttccgccctgcccgccggcgcccccccaccctgcacagctgtcacctctgaccacctcaactccctgctggggaatatcctgagaatcatcgtcaacaacctgggcattgacgaggcctcctggatgaagcggctggctggtgggtcggggggcactgggcctctgaggggtgggtcagcagcctgggctcccttggcagatggtctgaaagggagacccatggtcccctcggagttgggaggagtcagagtgtaggttttttcagcatcaaaagaccaggggtcagctgggcaccgtggctcacagctgtaacaccaacactttgggaggatcagttgaggccagccatttgcgaccagcctaggtaacatagcacgaccccatctctttaaaaaacaaaacaaaacttttttttaattagccaggtgtggtggcacatgcttatagtcccagctacttgggaggctgaggcaggaggatctcttgagcccaggagttggaggctgcagtgagctgtgattgcaccactgtactccagcctgggtgacagagtgagatactctctcaaaacaaacaaacaaaacaaaaggaaagaaagaaggaaggatggagtgagagagggagggaataaaagggaaggaaagaaggaaggaaggcaggaaggaaggaaggaagaaatggatcctcaaagcgttaggtttcctgattcagaagtttcatgtcagggccaggcacaatggctcatgcctgtaatcccagcactttgagaggccaaggtgggtggatcacttgagaccaggagttcaagactagcctgggcaacatggtgaaacctcgtctctattatttaaaaaaaaaaaaaaaaaaaaaagaaatatttgtgtaaggaaacaggttgtagatcagggtcaacctagaaatcaggagctgggatcagaggccagggtaaggggccagaggctggggtaagaagcccattcacaaccttggggtcatagccagaaatcacatagtgaggtaagactctgggtatgggccaggtcagaggttaaagattggggtcaggggtcatgctagttaagggtgaggtaacaggccaggtgcagtggctcacgcctgtaatcccagcactatgggaggccgaggcgggtggatctcctgaggtcaggagttcgagaccagcctggccaacatggtgaaaccccatctctaccaaaaatacaaaagttagctgggtgtggtggcagacgcctgtaatcccagctactcggggctgaggcaggaaaatcgcttgaactcgggaggcagaggttgcagtgagccaagattgcgccattgcactccagtctgggtgacaagagtgaaactctgtctcaaaaaaaaaaaaaaagttaggtaacaggtgaggcgtctgttgttgggggtcagaggtcagggatttgtgccaggctggggtcacaggatagggactgggtcttaggttcaggttaggggctatggctgggatcagtgttcagggactatatccaaggttagggtcaggctggggtcaaatggcagctgctaggttggagatgctgtttgggagtcgggctgggaacggagtttggggcctgtgtcagaggccggaggtggcatcagagcccatcgcacccctgcagtgttcgcacagcccattgtgagccgtgcacggccggagctcctgcagtcccacttcatcccaactatcgggcggctgcgcaagagggcagggaaggtggtgtccgaggaggagcagctgcgcctggaggccaaggcggaggcccaggagggcgagctgctggtgcgggacgagttctctgtgctctgccgggacctctacgccctgtatccgctgctcatccgctacgtggacaacaacaggtcagcggggccccgctgtccccatgccctccgccccgacctcccacgtcctccagccccatctgatctccgcctcctgactggctagaaacttcttccaatgctctggccccaccaaccttctgactcttcctcctggtttcttctggctttgagcacattggtccaacgacagccagcccacttgtttgtttctttttgtttttggtttttgggtttttttttgtttgtttttgtttttggagacagagcctcgctttattgcccaggctggaatgcagtggcgcgatctcggctcactgtaacctccacctcccgggttcaagtgattctcctgcctcagccttcccagtagctaggattacaggtgcatgccaccacgcccagctaagtttcgtatttttagtagagacagattttcaccatgttggccaggctggtcttgaactcttgacctcatgatttgcctgcctcggcctcccaaagtgctgggattacagctgtgagccaatgcagctggccagtgtgattttttttaaatcattctcctaatgctggacatttagattgtgtcgatttctttgtcactatgcacaacaccgtaaggaatagtttgctttttttttttttttttttattgagacagggtctctctctgttgcccaggctggagtgctgtggcatgatcatggcttgctgcagcctcggttcctgggttcaagcgatcctctgcttctgcccctgagtagctgggattatagactcacaccaacatgctcggctaattcttgtatttttatggggtctcactatgttgcccaggttggtcttgaattcccggggtcaagtgatcctcccacctcagcctcccaaagtgttgggattacagaagtgagccaccacacttagctgctttttttttttttttaacacaacaatacaccatgaaagacatataggccgggtgtggtggctcatgcctgtaatcccagcactttgggaggccgaggtgggcagatcacctgaggtcaggtgtttgagaccagcctggccaacgtggcgaaaccctgtctctattatgaatacaaaaattagccaggcgtagtgacgcaggcttgaaatcccagctactccagaggctgaagcaggagaatcgcctgagcctgggaggcagaggttgcactgagctgagatcgtgtcactgcactccagcctaggaacagagcgaggctccacctcaaaaaaaaaaaaaaaaaaaaaaaaaagatgtatagattcacctcttttgtcttggtggtcgtgtgacattctctgctgttggatatagttcaatttttcaatcagtaaatatgaacaaattgtggtttattcatacaacagaagactccacggcagtgggagtgaacaagttgtttctatgcacaatgtgattggctttcacaaatgttaggtggaatgaaagaagccagaaaaccaagaaataaactacatattttaccatctgtttaatgttcacgagcagataagaataagtttggggccgggtgcagtggcttacaactgtaatcccagcactttgagagactgaggcgggaggatcacttgagctcaggaatttgagaccagcctaggcaacatggctagaccctgtctctacaaaaaaagaaaagaaatacaaaaattagtcaggcatggtgacacacacctgtagtccttgcctcaggctgggactgggaggctgaggtgggaggatcgtttgagcccaggaggtcaaagctgcagtgagctatgatcacaccgctgcactccaacctgggcaacagagatagaccctgtctcaataaggtttgtttttttttaatacaagtaaatgaataaaataaaatatgtgaacctacttagattctgaccctgtctcaaaaaaaaaagaaattttatgctgggtgcagtggctcgtgactgtaatcccagcactttgggtggccaaagagagtggatcactcaaactcagtctcaaactcagaagtttgagaccagcctgggcaacatgcaaaaaccctgtctctactgaaaatacaaaaattagccgggcgtggtggcgcatacctgtagtcccagctaagtactcctgagtgggaggctgaggcaggagaatcacttggaacctgggaggcagaagttgcagtgagctgagatcacaccactgcactccagcctgggcgacagagcgagaccctgtctcaaaaaagaaaaaaagaaaatttttttttttttttttgagatggagtctcgcccaggctggggtgcagtggtgcgatctctgctcactgcaagctccacctcccgggttcacgccattctcctgcctcagcctcctgagtagctgggaccacaggtgcctgccaccacacccggctaatttttttgtattttttagtagagatgaggtttcaccgtgttagccaggatggtctcgatctcctgacctcgtgatctgcccgcctcggcctcccaaagtgctgggattacaggcatgagccactgcgcccagctgaaagaaaaaattttaaaaagtttttagcctagaagttagaatatggatgatttttcaggaggaggaagggggagtggctgggaggggccatgatagtacttccagggaccagaaatgtcctatttcttgacttcggtgctggctacacaagtgtgttcatttgtgataattcaccaggttgatatttcttaatatgtaggttatataatacatatgtatgtatcatgtgtgtctatgtattgcatgcatgtattatatttatgtatttcgatgaaaaggttagacaaagttttttaaaaaaggaatagtcaggccagggaaggtggctcacacctgtaatcccagcactttgagaggtcagggaaagaggatctcttgagcccaggagttcaagaccagcctggacaacctagggagaccctcttcctacaaaaaataaaataaaacattagccaggcctgggcatggtgacgtgcacctgtagtcccagctactcagggaggctgaagtgggaggatcacttaagcctgggaggttgaggttgcagtgagtggagatcgcatcactgtactccagcctgacagattgagaccctgtctcagaaagaaagaaagagagagagagagagagaatggatcgttaaaaaattttaaatgttcagctgggcacagtggcttacacctgtaatcccagcactttgggaggccgaggtgggtggatcacgtaaggtcaagagttcaagaccagcgtgcccaacatggtgaaaccccgtctctactaaaaatacaaaaattagcccggtgtggtgtcgggcccctgtagtcccagctactcgggaggctgagacagagaaaaaaaatttttttaatgttcatctgcatggccagatgaccctagaaaccccatccctctgactggatgtctcctggtccccatctcctcctccaagatctctctctgggcagcccccttccctgggatccccaccccctccctcacctcccctccgctgaccccagggcgcagtggctgacggagccgaatcccagcgcggaggagctgttcaggatggtgggcgagatcttcatctactggtccaagtcccacgtgagtgcccaccccaaccgccctccccacaaccagaggagccgcagcccacaggcgcctgccttcacctgtccggtctgcaacactgcttcccccaccagaacttcaagcgcgaggagcagaactttgtggtccagaatgagatcaacaacatgtccttcctgactgctgacaacaaaagcaaaatggctaaggtcggggcttggttctgggaggagcacttggcagagagggcgggagcaccctctaggacttcctacctggcctgtcctcacccagccagcccgtcctgggcgcaatccctgcagtcctcagagcagcccctcttacctcctctccctctcccttcctccccagctccttcctcctcctgtatcttctccctcctcccatctccctcctcctctccatctccctcttctctcatctctgtctccttcctcctcctgtatcttctccctcctcccatttccctcctctccattttcctcttctccaagcctctctctcctcccatttccctcctcctcctcctccccattttccccctcttccatttctttcttcctctccccattaccccatttcctgctttcctccctatccttctcagcactgcccttctcaggtctcagagaacgaccccccaccccgagccaaggcctggaaatgcccagctagagaatacatggcgggtggggcagaggaggtggggtgctggcaacttggagttgggcctgggcttctctgcggggctggggtaacccttcttgtctctgtctgcggtccggtgaagcaggcgggagatatacaggtcagccccacatctgggaccttccgcatgtctcttggctaatgccctcttcccccagcctctgcacgcccccgcctcgagaaaacccctgcttctgttccccacccccgtcctcccctcccagcccccacccatcctccttcccttcccttccctccccaccacccccatccgttcccatcccaaccctcagcttttggcaatttgacttcttttctttttcttctttccttttttttttctggacttttgttcccaaaaaaaaaaaaaaaaagaaaaaaagagcaactctcagcttttaccaaagcatcgtgggctgaggtcaagggtaatgggggtgggagaggcacacggagcatggttggggagggggcagcaccctcgccgtggatggtttaaagcttgggctctggactgtatggactggggttagaatcctgtcttgatagttagccgtgtgaccttggttggggtcatccttttgagcctctgagggcatccagccagcagcccccaccccagggctctgcgaggactcagggagaagctgcatgtgtggcctgcagcagtgcctggcacaggggtcatgctcaaagttgccagccggcgtggatgtggctctgcccaaaagcttgtcatcagggcttctcgctggcgtgactggggtggccctggccccgggtctgcacccaaggctccagaacacggctgtgggactctgtgccctgtgtctctgcttccagatctttctggatgtctcttgcatctttggtcttcctgtctccttgtctttttcagtctctcagtgtctttttcttgcaacttctcttgtcgcttgaactctttgtggacctgcatctttgtttcattcttgagaacttggttttgggatgtgaagtgtggggttgtgcatgctgtggagggggtattgtactggggttcctaggggattctggaagaggactgctagaagttgagacaggcccagaacgggggaaaatctggatgggcctgggttagaaattggagccaggcaagcatggtggtatgtgcctgtagtcccagctacttgggaggctgaggcaggaggatcacttgaagccaagagttcaagtccagcctgggcaacatggcaagacaccatctctaaaaataaatttgtttaaaaaacaagaaactgggaatttgggttgtggacttgggtctggagggtctccggtcatggctgtgggcctgaagtgtagagtcagcaagtctggggtggaaattgaggtgtcgtcggcagttggggagggagtgcctggtgtccagactggggcctggggtgtggatgatggccgcgggttggggctgaggcatgggattggggcttgggctggtgctgagccctgtgtccccacagtccggtggctcggaccaggaacgcaccaagaagaagcgccggggggaccggtactctgtgcagacgtcactgatcgtggccacactgaagaagatgctgcccatcggcctgaatatgtgtgcgcccaccgaccaagacctcatcacgctggccaagacccgttacgccctggtgcctgcccagccccgtcctcggaaccttccaggatgccgcccagcacccactgaacccctgggaccttagggaacaaccacaatgccactgagccccccaggtccctgggagccttcccttcagaccccactgagttcttttccgggatgctgaggactcactgtgcccctgggatgccctgaggaccccgttcaagatattgccagggcaccacagacctaagagccctcactgaaacctagaaaagctctaggacccctgggacccgcatgaggactgcaggaccccactgcccccccaccggaccatgccaaacctgctgagaccctgagagtccccccaacaagatgagcccctgagatcctctgaaccctccaccaaggccccttcaagccccttgggacctactgagaccctcatgacccctccttccctccctgccaagactgaacctctgggttcctgctgagcccttggctcaccatccctttccttcaggaccctgctgacacctgggccctgttgaagcccaactaagcccccaagactctcaggggctcagggagccctgcgaccctgcataactccccaggatccatgaaccccaagcccgggactgtacccaaacctctgaggtctcaactgtcctggagaccaaaatacccgggctgtagaacctcttaagcttgctgggatatcaaggaggcctcccgggaccccacttaccccttgtgtgggacaacaaggacaatctccctcctctccgatcctttccagcttcagggactctaaggaaccctcccaggattctgccccaagacccctatagccctccccccaggaccacaccaacaccctgacaacctactaaccccctggacccctaaagaccaccgacttctcccctgctaccaccaggacaccccttccctcagaacctcaggcacctcccaggactgctgagtcctgccaggacgccagagagccctccagggctccatggacccctcaccttggtccttgagggctccccgtcctagaaccccagtgaacccccaccctgctgatgccccctttggcccctgtgtaaccagtgactccgttgacctacgtgatcccccatgacctctgctgaccccttctgatcttcaaagactccctgccccactctgaccccccagtcatccctctttggccatatttgacctttgatgagatcctcttgtcaccctttgcctcttcccagacctccacgaggcccctcgaatccttactgtatcttcaaggtgactctgtgaccctccggcccctctaggaccccttctgaccccgtcaacctctgcatccttttgtttctctcagacccccacccccaccccagaaaaacctcttcagttcctggggtgctgggcctggaaggaaagggttgtgggtcaggaaggaggatgggacctccagagtgacccagcctggctctgtctccccagaaagacacagatgaggaggtccgggaatttctgcacaacaaccttcaccttcagggaaaggtatgcctccttcctctgcaagcaaaagaagcaagtcagaaagtaaccacaatattagtgaaggtttgagcatttaccaaagaccaggcattgaagaaagacctcaaaggtcaggagtttgagaccagcctggccaatgtggcgaaaccatgtttctactaaaaatacaacaattaggccgggcacaatggctcatgcctgtaatcccaacactttggaaggccaaggcgggcagatcacctgaggttaggagttcgagaccagcctggccaacgtggtgaaaccccgtctctactaaaagtacaaaattagctgggtgtgatggcgggtgcctgtagtcccggctactcaggaggctgaagcaggagaatcgcttgagcccaggaggcagaggttgcagtgagctgagatcgcaccactgcactccagcctgggtgatggggcgaggctccgtctcaaaacaaaaagatgaagaagaagaaaggcctcaacatgcactcacccattgagtcctcccaaaaacggaaaggggacatccggcggacactgtgggaagggtccctcacgccggccactccttcttcctcccttcaggtcgaaggctccccgtctctgcgctggcagatggctctgtaccggggcgtcccgggtcgcgaggaggacgccgatgaccccgagaaaatcgtgcgcagagtccaggaagtgtcagccgtgctctactacctggaccaggtgggtggggccggaggggtctttctactgggtctctgggcggagcctggcggggggaggggcttcaaggatgtgggtggggtctggagatgactattaagttttggggcagggcaggaggtggagcctcgagtttaaggcgaggcttagaatggatcgggggaggggtctgctgcttaatcttgcatctgggggcgggacagggaaggggcagatctttaggtctaggggtggggcctagaggagatgcgttgagtttgtgggcagggccttgggtgggtcgtagaattggtcgtggcctggctcgtggtcctggctctgtgggacctggcctaggatggaaacttaggtctggaggcggagtcaggaccctgactctgttggtggagacaaggttttccttctgccgtgtgagtcttaacctgaatatggacttcgacacagctgggcagtttcatccagggctgggagtgagaggggcagggtctggggatgtgactgtcctgctatcccctccccagaccgagcacccttacaagtctaagaaggccgtgtggcacaagcttttgtccaaacagcgccggcgggcagtcgtggcctgtttccgtatgacgcccctgtacaacctgcccacgtaaggcccccagggacaagggaagcgtgaagggctgcggagaaagggtggctggagagtctggagaatggagggccaacgtgatggggccttgagggtggttgggggctgcaggcgcatgggaggtcgggaagcacggaggagggcgcgtcccagtgacgtcacacctctcccctgcaggcaccgggcatgtaacatgttcctggagagctacaaggctgcatggatcctgactgaagaccacagttttgaggaccgcatgatagatgacctttcagtgagctgggacccgcctgggggagtggggggcgagctggatagggctggggcggaggccacccttggcacacctccaggggtcggccctccacatcaaggggtatagaaatgccagctcctggcttgagtagaaccaaagtagggcgcaggatgtgggaaaagagaaaaaaaaatccagaccaacagggacatgggggcagtgacaggaggggactctagaaaccctctccccaagtctcccctctcccaccagaaagctggggagcaggaggaggaggaggaagaggtggaagagaagaagccagaccccctgcaccagttggtcctgcacttcagccgcactgccctgacggaaaagaggtgaagactcttgccagggccccagaaatgcccccaaggtcctggggccacccccagcccagcagcttccctgtgcctcaggagaggccctccaggtcctgggggagcccaagacagacggatctttaaatatcactttgctggtcaggcacggtggctcacgcctgtagtcccagcaatctgggaggctgaggcaggcaatcacttgagcccaggagttcaagaccagcctggccaatatggcaaaaccccgtttctacaaaaatacaataaatagccaggcttggtggtgggcacttgtaatcccatctactcaggaggctgaggcggaagaatcgcttgaacctgggaggcggaggttgcagtgagccgagatcataccactgcactccagcctgggcgacagagcgagactctgtctcaaaaagaaaagaaaaggaacgtaaatgtcactttgctaggacaggcacagccaacatacaccgttgcatggctgaacacttcacaagggcatgtctgaggggttcgtatcacagacaatgtagattaactaggcttttctagaagaaagtgtcttgctcaaataaaatcagtatattatgaaaaaaatccatatgtatgacaaatttccaacagacagaagtagtggggaggttttctgtaattccctcaaaagcttcatgtaggctaatgacaggcttagtaataaataattgtgatgcagatggcgcagctgctgccgctgctgctgacagtagcaggcagccattcatcaaatgcttattatgtgtcaggcaccaagctaagcggggatatctatatcctctcacttaaccgccacactgtgagacggattattgcatctcctttgtgtggataagggaatgaaggcacagggatttatttttcattttgtttatttatttatttatttatttttgagatggagtctcgctctgtcacccaggctggagtgcagtggcacaatctcagctcactgcaacctccgcctcccaggttcaagcaagtgggattacaggcgcccaccactacgcccagctaatttttgtatttttagtagagacgggctttcaccatgttggccatgcttgtctcaaactcctgacctcaagtgatcttcccgccttggcctctcaaagtgctgggactacaggcgtgagccactgcacctggcctacttttttattttttgagaagatcttgctcttcttgcccaggctggaatgcagtgtcatatcatagctcattgcagctcagaccccccactccacatcaccccaggctcaagagatcctcctgcctcaacctcctgagtagctgggactacaggcacgtgcctccatgcctggctattttttttttttttttctggtagagatgggggtctcactatgttgcccaggccggtctcaaactcctgaactcaagcaatcctccccactcagcctcccaaagtgttgggattacaggcatgagccaccgcgcctgtcagggatttgtttttcttacataacgtgaagtcaagagctaaagacttcaggactgggcagtggcacagggacactgacaggggcccagggtctttctagctttctgctctgcccttcttagcttttgtctgtagtcctgggtggatgctgcacttctaggcatcacagccacatgccaggcagaaagaaggacaaagggtccccactcttcaccctcagcaagatctttggtctctctctcttttttttttgagacggagttttgctcttgttgcccaggctggagtgcaatggcgcaatctcggctcgctgcaatctccacctcccgggttcaagcgattctcctgcctcagccttccgagtagctgggattacaggtgcatgccaccatgcccagctatttttcttttttctttctcttttttttttttttttttgtatttttagtagagacagggtttcgccatgttgtccaggctggtctcaaactcctgacctcaggtgatctgcccaccttagcctcccaaagtgctgggattacaggcacgagccaccgcgcccagccttctttggtctctttatctctctggtgagcttccacacagatctcattggccagaaattctgacataaggccatctcgggctgcaaggtgatgaagaatttgagcatcccattttgcatcctgtgggagagcgatggctctggagtttggccatccaagttgagtcccagcgcaagctgtgtgatcccagccgagaagggtctttgtatcttagttcccccaccgataaaatagggctattaacatacccacccaattggatgactgtgagggtcagtttgttaatatatacaaggcacctagaacaggcactgacatggtgttagtgtaaacactcagcaggtgttggccattgtagaggagacccaagcagaaagggattggccatacttgttattgagctgacaggtggcaagatggctctgggagctccagccttccatcactccattttagcatccccagtggaaagggagtgcctccaccattagctccagcaaacctcactgaatgggccaggcgcggtggctcacacctgtaattccagtactttgggaggccaggagtttgagaccagcctgggcaacatagcaagaccctgtctctacaaaaaaatggaaaaattagccaggtgtgttggtatgtgcctgtagtcccaactactcaggaggctgatgtgggagatcacttgagcctgggaggttgaggctgcagtaagccttgatggcaccactgcactccagcttggccaacagagcaagaccctgtctcaagaacaaaataaacaaacaaaacaactcccagaatggattttactggacagcatggacaacatgaccatttcttacctgtcatcatggccacacagataaaagtcctcatcggccatgcatttgtcacaagccaccctggcaatggccactccagccacctgagtcacacagcctgaacatggggagggttggccctccaaagaaaaccagaagctctttttttttttttttttgagatggagtcttgctctgtcacccaggctggagtacggtggcgcaatgtcagctcactgcaacctctgcctcccgggttcaagcaattctcctgcctcagcctcccgagtagctgggattacaggcaagcaccatcacacccggctaattttttgtacttttagtagagacggggtttcaccatgttggctaggttggtttcagactcctgatctcaagtgatctgcctgcctcagcctcccagagtgttgggattacaggcatgagccaccgcaccctgcccagaagctcttataagatgggggtcctctccaccgggtcctgaccactcccctgcttacttccccagcaaactggatgaggattacctgtacatggcctatgctgatatcatggcaaaggtgaggccctacccccctcttctggggcagatttccctctccccacctgcagtgcttgtccacaaaaagggctggggcgggatggaggggtctgctttgttcatcccttaactgatgccccctccccagagctgccacctggaggagggaggggagaacggtgaagctgaagaggaggttgaggtctcctttgaggtaggtgggctcaggaggtcctggagggaagggatgggggaccctgactgcagtcatctcccattcattcagcatgtgttcacagagcaaagctctggggacacagcagtgaccaagtcagtccactggggagacagatacacccgccaaactaacaccacggagtgtacaccatggtcatgggggaagctcaggcagaggggtcagggctggaattggggaggctcaggcagaggggtcagggctgggattgaggaggctcaggcagaggggtcagggttgggatgatggggatacaggcagaggggtcagggccaagatgggggaacctcagggggataaagcagcccaaacaaggtgcctgacccagcctgcaggaaaatgtatcagggagggcttctcggaggaggggacttctgagcagaaggataaaaggagcctgccagttgaagaaaaagagaaaaatgttctacgtagggagaatagtatatgccaaggccaggcagcaagaaagagctagtaaacatgcaattcaccgatccattcattcattgagacagttagcaagcatttacttcatagttttcttcactgtttctgtgccagagtcccttctggcatctggtgaagactttctcaggatcatgtttttaaatgtataaaatgaattcatagcagaggaaacaagtattgaatagctatcaaaatattttaaaaatgaatttgtgatccagtaatacttgtacattgttaatctatcaaataagatctaaggctgggcgcagtggctcacacttgtaattccagcactttgggaggccaaggcgggtggatcacctgaggccaggagttcaagaccagcctggccaacatggtgaaaccccatctctactaaaaatacaaaaatgagctgggcatggtggcaggcacctgtaatcccagctactcaggaggttgaggcaggagaatcgcttgaacccgcgaggtggaagttgcagtgagccgagatcacgccattgcactccagcctgggcgagactccatctcaaaaaaaaaaaaaaaagatctagcagtagatccaacagctactataattgagaagtagtgatgaacataactgatatttaaagacatctttgagccattgtgagtgagtctctcttcctggaccaaaagagcagaatttgaataggaaatggttctaattctgcaacaataatgtgatatggaatatacagcaataataatgtgatatggaaccatctgtaattttttttttttttttttttgagacagagtctcgctgtgtcgcccaggctggatggagtgcagtggcgtgatctcagctcactgcaacctccacctcccgggttcaagcaattctcctgcctcagcctcccaagtagctaggactacaggctcatgccaccacgcctggctaattttttgtatttttagtagaggcggggtttcactgtgttagccaggatagtcttgacctcttgacctcgtgatctccctgcctcggcctcccaaagtgctgggattacagatgtgagccaccttgcccagccacatctgtgatttttattggtgacaaagccacaggttctgctaatatcgctgtgatttatggcttcatccatataggaaggaaatgcttcatttctgttagagggcggaaaacataaaaatgtaacttttcatcatccaagttcacagatggcctggaggcccatgggcccaggttaagactgctgcatgcccagctctgatttatgtagatcttgcctaatgcctagccccgtgctaggtacaggagatacatcgagggtgtgagccccaggggatggagggagctcatggttgaaggagtgagttgtggatgtggctggaacagggagggcagaagtgagaatgtgagggggaaaggctgggctggaaagcctggacttgccttcatgtgtctgcctcccttcccaggagaaacagatggagaagcagaggctcttgtaccagcaagcacggctgcacacccggggggcggccgagatggtgctgcagatgatcagtgcctgcaaaggtgcccctcacatgtgcactggactcttccgagtgcactcatcctaacctcactcctcctggctcgcccattccctgtggacccatttgccgcccctcaatgcctgtggtttgcacgcacaccccagcccttgcagcttccccttgtatacctgccttgcaatttctcactcatccttcaatcacgatcacccctgcatgcacaccttggcacactcttaaatccccttctctcacatcccttgggatggctgttttctggtgggtggaacacactgccttccaactgggtggaccatcttttttctcccactccctccaggagagacaggtgccatggtgtcctccaccctgaagctgggcatctccatcctcaatggaggcaatgctgaggtccagcaggtaacagaggcaaagggacttcagaagaaggcaaggagggatgagaggttcctgtgtgactcccagtttctcctcccctgcctcgccctctgcagaaaatgctggattatcttaaggacaagaaggaagttggcttcttccagagtatccaggcactgatgcaaacatgcaggtaggttcgagtggacctcttcttgttaagctgtgtttggtgccactgccaccccactcctggtaccatttccagttctgattctgctctttcagtccagggaaagagactcactcagaatcgctcaaataacagggaatttattataagaattaatgtagaacaataagggaggcaaaatgtcatagacttgaagaatgagttgcattatgaattccagacagtggaaccaaaaacttgagaatttaaggggaacttggcagtgggagatttaggagctctctgatgatcccaattaatctgcctctactgttgtctgcctttattcacctcttgctgccggctgatttttcctaccctctgcagcttttgctaaatgggtggtttctggttcctcattatttcagcttgcgcatggttcatcctggcccaaccatatgtcctagcttctgccaactcttcatttctgcttcctcttgatttcagcgcatagatggtttactgtggctctccaggctaccatggtggggagctgccaggccctgggagagaggagggcagaggcttcatcacataccccctatctttcctttcttttcctcagcgtcctggatctcaatgcctttgagagacagaacaaggccgaggggctgggcatggtgaatgaggatggcactggtgaggccctcccttgggcttcccaccccctgagacatcttcctttgggattcctcccaccccacccccacccgccattgcccagagctcccttcctccaagacactggttcccaagggctccctcgggtccctccctctgctgtggtcccccagtcccaccccctccatccccctggggtctccctccccatgtccaccacccacctccgcccccccccgccaccagaagtcattctgtcttgtgttctcacccatcactacatggaccccaccctccacgtgccccaaatgtcacgccctggttgctgttctcttattaatgtccctaatccgggttaatcgcgtctcctctttgccgtgttgtgacgtgtctaacctttctacccggatcctcgctcctgcctttctacctctatgtcttcatctctctctctccctctccatcctcttctttcattccctctgcttttaccctcatttcctaccctcttccctgctaatccatttccttctgtctccttatcactctgcctttctctctgtgggttgttcctctctctctgtgtgtctttctgtgtctctgtccctgactgtcattgtgtgtgtttgcggtctgtctccctctctttttctctcttttctcctgcttcctcctcccatcctgttggctgccccagtcatcaatcgccagaacggtaattcccccagcccacccccgtgctgtgctgctgtcacccacccctcctaaccccgtccacccctccacctaggggctgaggatctgggacgtggaggggagggagggacccttcagcaggtgcaccctgccagtgcaaaacctggagatcaggagtctggggagcatgattcaggtcccagatcagccactgagaatacatgggcctgtgaacaagtctcttaccttccctaagcttcactttccccatgtgtgaagcagaagctagagaacatggtaaagatctctttccagctggatattgtcggacttccagacccagattcgcagtcccggtgtggagtgatccccactcccacctactctgctctctgcaccccgacctcagattggtcagtcagcgtttcccatccaccaaccgaattggttgcctccggcatccactctgattggtgtgcgcctgcctcctctgcgcctgcctcctctgtgcctgctctggttggcccatttgcggtctagcctcctcccctaccgcccaccatgatttgcttctttcagatgcccattctgattggcccttgtttacacgcctcccctgtgctactcctggattggctgctttcaaggcatctgggccaattggctggctttcaatccccatcccttatccctcccagcccaatcttcccctgcccagagcctttgtgtgaaggtgacccaaacccccataatccattaacctccacggtctgaaggggggctgagggcattaccagctgcctgaatgtctgctaggtcagcagactctcccgaacgtaacacaagtggtgacatcagagggcactgatgtagaaagacacttgaggccccagcttcatgactcagggccccttgggtctccgtctgctgatgtcatgggctctgaggtcaagaccgcctggcgtcatggatgcccatggccctcacagtgtctttggagtggcagctgctcctcccagcacccccatgctttgtgcatgcgtgtgcagtgtgcatgggccttgtgcatgtgtgcgctgtgtcttggcgcatctgacccctcctgggccctgtcccctcccttccacctaggagagaaggtcatggcggatgatgaattcacacaagacctgttccgattcctacaattgctctgtgaggggcacaataatggtgaggaggaggggtgtggggtggaggggaagccgaggtttggggctggtacggaagggttgactgaattagtttccgcccctcctcctcccccggtcaatgatggccactctccagccagtgtcaatccacctagctttcaaaatctctctggaggctgggcgcagtgactcaggcctataatcacagcactttgggaggcaaaggctggtggatctcctgaggtcaggagttcgagaccagcctggccaacatggtgaaaccccgtctctactaaaaatataaaaaaaatagcagggcgtggtggcacatgcttgtagtcccagctactcaggaggctgaggcaggagaatcgcttgaacccatgagatggaggttgcagtgagccaagatcgcaccattgcactccagcctgggcaacagagcaaaactccatctcaaaaaaaaacctcgctggaatttctggaatctagccactttgtttccccctcatctcctctggccagtccaattccccaaaagcaacctgccaaaaaccaatttggccaaaaatcaatttgcccaaatggacaatttgtcacatgctattttcccacaggcgctctgcagtggctgccaaagttctatacacgtggtggatttctgtactttaggtccagaaaagacctaagggaaaaaactgcctggcatttaaaaataaatctattagaatcacttgtttattttgcttataaaatctttgcagaggaaagatctgtacaaaggcctacagattctttcctatcttaagcaagagttttgttttgttgtggttcagccaatttaacaagattgaggatgacagcaaattaattacacaacatcaatgatgagaaatgcagtctcatgcagcaaacctagcttacaactttacagaacagacaaaattctgcacaaaaaacattctacccaatgccatttcctataacaaacatgtacagtctcaagattgtggttataacctttagcaggtgattaggaaaccacagactacccggaaatcaactttcgtgacaagaattggagtaattagtaatcttacttccatagaaccttcacccacttggttagtgctctttaaggtaactgatttgtaaatatctttaatcttcattctttttctttcaacaaaggataaagtatgatctctttgtcttgaattttcaaaagctcttgtgtccacaacgagtttttcaaggtttattaaatacctttgtgccatgggactaagattttttcttttttttttttttttttttagacagagtctcactcttgtcgcccagactggagtgcagtggtgtgatcacagctcgctgcaacctctgcctcctgggctcaagtaatccacccctcagcctcccgagtatccaggactacaggcatgcatcaccatgtctggctaagttttttattttttgtagagatgagatctcactgtgttgcccaggggatctcaaactcctggattcaagcaatcctcctgccttggcctcctaaaatgctgggattacaggtgtgagccaccatacccagccgggactaagattttcattctttaattttaactaagatggaatcagtctttgggtttaaaataaattttattcctcaggaatatgaagttttgaaaatgagaatgttgttatgaaagggattgctgtctcccaacatatttgcaacccagtcctcgcctaaattcatgacctaatcaaatagatatttgaaatatctttcaaatctcagaccccttgcatgtcttgaggagtcagtgctattcaaagcagacaaaaggtttgtctctcacttatttgcacatgtctataacaggtgttgtcagttgccagaattttttttacaggagctgtgtatcttttatttttgcatatagcccaatttaaattaacacaatttaatttaacaatttaaattaacacaaataaaggagttagaaagcagggttgatgggaaaacctgtacctttgcttataaaattttgaatatttgagtatgctttgtctatgtcatgaaactaggcaaaatgggccttctgttgagccaacctgatagagcaattgtgaactgactgtaaaaaagttaaggggaaagaaaaacggggggcaaaaatactttcaggggctgttaaaaccttcctgtgcaacatgatgttgctataaacatttaaaaggacttggctgggcactgtggctcatgcctgtaatcccagcactttaggaggctgaggcaggaggatcacttgagcccagcagttcaagacaagtctgggcaacataaggagaccctgtctctaccaaaaaaaaaaaaaatcatatactacagtataataaacctccaatcatatactacagtataataaacctccaatcatatactacagtataataaacctccaatcatatactacagtataataaacctccaatcatatactacagtataataaacctccaatcatatactacagtataataaacctccaatcatatactacagtgtaataaacctccaatcatatactacagtgtaataaacctccaatcatatactacagtgtaataaatctccaatcatatactacagtgtaataaacctccaatcatatactacagtgtaataaacctccaatcatatactacagtgtaataaacctccaatcatatactacagtgtaataaacctccaatcatatactacagtgtaataaacctccaatcatatactacagtgtaataaacctccaatcatatactacagtgtaataaacctccaatcatatactaaagtgtaataaacctccaatcatatactacagtgtaataaacctccaatcatatactacagtgtaataaacctccaatcatatactacagtgtaataaacctccaatcatatactacagtgtaataaacctccaatcatatactacagtgtaataaacctccaatcatatattacagtataataaacccccaactacccatcactcagctttaacagtttgctttcacagaacaatgttttttaaatagtgggaaccaacccatcagacagacgttcatgaatcagtttcacgcagaggttctcattgtaattgtacactggcatgcctggggagctttaaaagagacttaagcccaggttttgcctttacaggttctaattcaattgatctggggttgggcctgagcactggggtttttaaaagcctcctagttgtcctgatgtgcagccaaggttgagaggatgagaagcacacacttcttcttttgtagttaactagagcagtacaggacagaaaagaacagaatgcatggcacagagtaaggcaatgtgaaacttctctttcgggaataggtgaatataatttcagattgaacacatgtatcaggtctcaatgtaaaaaggatttcctcggctgggtgtggtggcttacacctgtaatcccagcactttgggaggccgaggcaggtggatcacaaggtcaggagttggagaccagcctgtccaatatggtgaaaccctgtctctactaaaaatgcaaaaaaattagccgggcgtggtggcgcatgcctgtaatcccagctactcaggaggctgaggcaggagaattgcttgaacctgggaggcagagtttgcagtgaactgagatcatgccactgcactccagcctgggtgacagagcaagactgtatctcaaaaaaaaaaggatttcctaccatagattgcagtcagaaaagattaaaaaattactgcacaagaatataaacttcacaagggcaggggctggacatacggctcatgtctgtaatcccagcactatgggaggtcaaggtaggagggttgcttgaggccaggagttcgagaccagcctgggctggtctcaacaaaaaaattaaaaattggccggatgtggtggctcacacctatagttccagctacctgggaggctgaggtgggaggaccacttgaacccaggaggtcaaggctgcagtgagctatgatcatgccacagtactccaacctaggcaacagagggagaccttgtcaaaaaaaaaaaaaaatcccccccaaggccggggactgttttttttttttttactactgtatccccagagcctagaatactgcatgacacatagtaagaacgcaacaaatttgttgtagcaaagaggatgtgacaatcttaatctcgtgaggatgtagtatacactcaataaaatatgttgaataaatgaacaagtgaccaatccatatgttccctggcctttagtaggtgctcaataaatatttgttggataaatgcatgaatatccccagcacataggaggaatttgataaaattgtttggaaactaacgaggaactgaatctctatttctccctgctacatagttggtggtcaatatacaaatttgttggaaaaaactgaatgaataaatgacgctccaccacatttgacacatagcaggccctcaataatatttatattttatttttttatatttatttattttttgagacggagtttcactcttgttgcccaagctggagtgcagtggcatgatctaggctcactgcaacctctgccttccgggttcaagcaattctcctgcctcagcctcccaggtagctgggattacaggcacatgccaccacacctggctaattttgtattttttttagtagagacgggatttcaccatgttggccaggctggtctcaaactcctgacctcaagtgatccacccacctgggcctcccaaagtgctgggattacaggtgtgagccaccgctcccagcctattttaaaattatttatttatttatttatttatttttgagacggggtttccatcttgttgcccaggctggactgcaatggtgagatctccactcactgcaacctctgcctccggggttgaagcgattctcctgcctcagcctcccaagtagttaggattgcaggtgcccaccaccacacccagctaatttttgtatttttagtagagacggggtttcaccatgttggtcaggctggtctcaaactcctgacctcaggtgatctgcctgcctgggcctcccaaagtgctggaattacaggcgtgagccacccggccagtatttttagacaaatgaataaatgatcatccatctttctctgtcacatagtaagtacttgatagttattaaataaattgatgatgatatgctttctggcatacaataggaactcaacacatgagtattgcataaatgaataaatgacccactgttcatctcccctagcacatgggaggtgctggataaatgacttttcatctccccagatttccagaactacctacggacacagacagggaacacgaccactattaacatcatcatttgcactgtggactacctcctgcggctgcaggtgaggacgtgagacggttcaggtgtgacttgggtcgggggctgcagggccatggtcggccccagcaccccctcacaccctacccgcccccaccaggaatccatcagcgacttctactggtactactcgggcaaggatgtcattgaagagcagggcaagaggaacttctccaaagccatgtcggtggctaagcaggtgttcaacagcctcactgagtacatccaggtagggcgctccccctggggcgggagtgggaagggagggggtcccgcatcgtgatccctgatcccttctcggggattcccttcccccccacacggcactctgcctcccagggtccctgcaccgggaaccagcagagcctggcgcacagtcgcctatgggacgcagtggtgggattcctgcacgtgttcgcccacatgatgatgaagctcgctcaggttcgagcccctctggtctccatccacctgcttccgggcgtcccccaagtggtccatttccaagtcttgcccctttggtcagtttgtcacccgagtgctcccggcatgttccagactggttccctctcagtggccaaatccatcctctttctggattggctgtctgcatgaccccgcctcctcctctgcccctccctccccaccaatcagctggttttccatccacgcttccattggtctgacgtgttggccccgtcccaatggccggagctcctctatgattgattgctgtttttctctctgatgagtcatcgcagatgtggacagtccttgggctaggatggggctggtttctagattagagcctggggctgaggaaatgttttgcttctttatcttacttgcggcagatgacacccatatcaggcattcatgatgtaaggtccctgttgagcaccaccttccatttccataatccttgttcctctttccctcacccctttgcagccttgccaatgtctcacgaacacttaatccatttgctctgcttctgtctggtaactatattcaaggctgccatatactgttccgcaggtcgtgcactgcacaaaggcacgatctctgagagcattcacatcctacacataatggtgtatttattacaatagtttagttttccagcagatggcagtaaagcatccagcatgttataacttccctacaggaagtgttttaggggacgcctttttttctaatttgctcaaaggtgccccaggggctggcagaaaccctaattcgttgtcatctgactttttaaaaggagttaaacttagaatgcaattcctccgtgtcacagcagctgaagttgtgctgttggtatcctaaaattctagagagtgttggtatcatcatgtagaattccaaatcctgcagggctaattcatccgccaccatctagtctaggttgcaaaagctagaaatccagtgcaaagtggtggcttaagaaaaataaagaatttatcagttcatattacagatccagggcttagagtgatgtcagcagaactgcctcctctttgactgcatttgcaagcaggctgtctccctgggctggaaaaaatggtgcctcaggctcctatccactctacttcttaacagccctagagggaagagatctcctctttcctgaaagctccaagaaaaaaaaaaacctgagattctctctgactagcctattgggtcacatgtccctccctgaaccaatcatcataggcttaggaaagaaagctttgactgaccaggcccggtcatatacccacctatagaaccaggaggtagggttagccccatgtgctctgactgtgggatgggggactccgcaggtgaaaattgagggattgtaaagagaggagggggactgaatcatgggtaggcacaaaccacaggcgcccacccactgtaagatcttgagattaggagtgtcgggaccttaggcgcagaatgcagagctttggaactgtggaaatacattaggattggaatcaacaactgatagaactagcatgggagcaaaagatccttacatcccatttatctggtatcatctcctcccctctccattttatttggtggaaccatatgaaattaccactttggatctggcacggtggctcatacctgtaatcccagcactctgggagccctaggcgggcagatcacctgaggtcaggagttcgagaccagcctcaccaacatggagaaaccccatctctgttaaaagtaaaaaattagctgggtatggtggcgcatgcctgtaatccagctactcgagaggcttaggcaggggaattgcttgaacctgggaggcagaagttgcagtgagccgagattgcgccattacattccggcctgggcaacaagagcaaaactctgtctcaaaaagaaagaaattaccactttgtgagccaaaagtgatcacatgttggcaattttatgtgactcaacctaacataaataggggccatgaggcaaaactttgtattggaggtttctatgggccctacactgtggccctatgttccccgcagacggcttaccagaaagcacatggctgtctctgcagccttcctcctgaacccagagtcccactcttgccatcacacattatattcaacatacatctgtcaatcccaccgtaggccaggcacagtgctgggctcacatcccttcctagacctgggtctctgtccccagtgtttgtctctgtctgtctctgtctctctctgccccaaatgtctgccccgcaagcctctcagtcctccttgtctgccagccttcccactacccatcacctatcgagcccgtcccccaagtgccaaccccacccccacaatcttgtctctctgccccttcccctgcttccgaggaacatgtctggactcgggtcccctcggaggtaagaggggagaaaacgggtttaggccctgctgggtaggtgaggagggggagaagcaacagaggtgggggaggtgtatgctgagaccagccctcaccgagctgggatctctaggactcaagccagatcgagctgctgaaggagctgctggatctgcagaaggacatggtggtgatgttgctgtcgctactagaaggtaaacacccaggagtgagggtgagggaacagtaaagaggttcagagaagcctgagaatggccccctgagacccgggagaccctaatcctcaaccccatctgacatcgtgtcaggatccatgggttgatgaagaagccataataggccagatgcggtggctacacctgtaatcccagcactttgggaggccgaggtgggaagatcacctgaagtcaggagtttgagaccagcctgggcaacatggtgagaccctgtctctactaaaaatacaaaaattagcctagtgtggtggtgtgtgcctgtagacccagctactcgggaggctgaggtgggaggatcaccagagcccgggaggtccaggctgcagtgagctgtgatcacaccactgcactccagcctgggtgacagagcaagaccctgtctcaaaaaaacaaaccccaaaaacaaaccaaatgtccaaatgtggcaaaagataaacaattgatgaatgtggatatattaggatcccttttttttttttttcttttctgagacggagtctcgctctgccgctcaggctggaggtgcggtggcgcgatctcggctcactgcaagctccgcctcccaggttcacgccattctcctgcttggcctccccggtagctgggactacaggcgcccgccaccacacctggctaatttttttttttttttttttgtatttttagtagagacggggtttcaccatgttggtcaggatggtctggatctcctgacttcgtgatcctcccgcctcagcctcccaaagtgctgggattacagacttgagccactgcgcccagcctacattaaaatttaaaaattacaaaaataaactggagccaagcttcagctgctgcctttagagggagtgtgggatcgcagtttgccaatctctacctctccttgctgcttaccactggctagcctcagtcttctgtggaccctcctgactgtgtgtactggtggaagttttagttgtgtaagccctgaggtcatgcagctctgagttcaaatccattctccccactttactggctatgtaactttgagtgcatgactttctctatgtctcagtttctcttcctaaaagtagagtcacacacttccctttttgtgtgattgtgccagggtagcatttggcacctacctttagcgtacatcatcattatctttttttttttttttgagacagagtctcactccatcacccaggctggagtgcagtggcacgatctcggctctgcaacctccgcctcccaggttcaagcaattctcgtgcctcagcctcccaagtagctggaaatacaagcacatgccaccacgcccagctgattttgtatttttaatagagacggggtttcaccatgttggccaggctggtctcaaactcctggcctcaagtgatccacccacctcggtctcccaaagtgctgggattacaggcgtgagccaccacgtccgacctgacatcattagctttactgggggaggtgggcaaaggcaggatcagccaggttggcacaggaggctgacgcaggtcaggaagggacctgtggaggggaggctgtggctggccagggacactccagcagcgtggtggctcctgggctggaaagagaggcaagcctggtggggccccagaagggagtgttcaccggccacactgacctggggctgcctgcagggaacgtggtgaacggcatgatcgcccggcagatggtggacatgctcgtggaatcctcatccaatgtggagatgatcctcaagttcttcgacatgttcctgaaactcaaggacattgtgggctctgaagccttccaggactacgtaacggatccccgtggcctcatctccaagaaggacttccagaaggtgggtgtgggacatcgtgtgggcccaggacttgggtggggttgccaagggccagccatacccttctggctggctgcctcaggcaagagacatctctgcaagcctcactttccttgtttgtaaaatgaggataaaacagtccttgggttatatgtattctgttttatttcattttagagacaaggtctttctctgttgcccaggctggagtgcagtggcgtgatcatagctcactgcagccttgacctcctggcttaagcaatcctcccacctcagcctcctgagtagttgggacgacgggtgtgtgacatcatgcctggctaatttttaagtttattttttgtagagatgtggtctcactacattacccaggctcctcttgaactcttgggctccaacaattctcctaccttggcctcccaaagtgctgggattataggcatgagccacctcgctcagcccccttgggttattttgaggatgaaatgcattaacacagatgagaaccgttattactgttatctttattgatagtcataacattatcattattgtgaataggcatcagttattccatcaataaacattggctggctttcttctctgtgtagggcctgtagtgacactattgacgcatcaatgaccaagatagacacagcccgtgctttcatgggtttatagtctaatgggggaggcagtcactaactagaccattccaagtctaaataatgagcctgctaggagggaagtgctggaacatccttattcagaaacccactcctcctcctctaaccacctctcccatcctaactctccatcttttcttctgagcctcagtttcctactctgtaaaatggggataggataatcacattaaccactaactattggcagtgtgcggtggttcatgcctataatcccagcaatttgggaggccgaggtgggaggatcgcttgagcccaagagttcgagatcagcctgggcaacctagtgaaaccctgtatctataaaaataaaaataaaacaactattaactattgtgaggatgggcagtgcgggcagtacctggaatatggtgagtcctcaagagatgttagctgctattactactccctgatctttaatgttaccattttgttaactttttattttgaaataacttcaggtttatagagacgttgcaagaacagcacatagaatttctgaatacctttcacccacattgcccaaatgttttctatttactatttactccatcatgatttccctttcctttccttttttttttttttttttttttttgagacggagttttgctcttgttgcccaggctggagtgcagtggtgcaatctcagctcagtgcaacctccgcctcctgggttcaagcgattctcctgcctcagcctcctgagtagctgggattacaggcacgcaccaccatgcccagctaaatttgtgtgtgtgtgtgtgtgtgtgtgtgtgtgtgtgtgtgtgtgtgtgtgtgttgtatttttagtagagatgggatttcaccatgttggccaggctggtcttgaactcctggcctcaagtgatctgcctgcctcggcctcccaaagtgctgggattacaagcatgaaccacctcgcctagccaatttccctttactttgaaacacttcagcgtgtatctcctgagaacaaattcattctcctacctaagcacaggacaattatgctaatcaggaaattaacattggcacaatgctgctatctaatcctagaccttattcagtttcccttgttgaataaatttctttcgtcaatgtcttttctttgccaacccagaaccagggattgtatttaggtgttctgtctgttttcctccttcagtctggaactgtgcctgggtctgtctttatctttcctgacatgtttgaagaacgcaggcaaactgttttgtaaaatgtcgttcagtgtgggtttgtctgagttttcatcattatcagactagggttatgcatcttttgcaggaatatcagagaagtgatgtgtcctcagtgtaatgtattaggaggcacatgtggtttcatcccattactgtttattttcttatttatttgtttttagagtcagagtcttgctctattgccccggctggagtgcagtcaaacaatcctagctcactgcatccttgaccccctgggctcaggcgatcctcctgcctcagccacccaaagtgctgggattacaggtgtgagtcactgcacctggccaatgtctcttcccattactgttgttaacttggatggcttggttaactcggtgttcaccaggggctccacaatgaagttactgttattccctttggaatcaataagtgtctcatgaggatatactttgaggctatgtaaatattctgctaactctggggtcatcatccattgatgattcttgcctgaaacaattattcctctagtagctgacaaatggtggttttctcatttcgccgtatgctttaccatcactaggcaccattttactgtaagaaagagtgtttccttcttgtccatttcatttcattttctcattcatccattcatttatatcagtgtggattcacggctttttttttttttttttttttttttttttttttttttttgagacggagttttgctcttgttgcccaggctggagtgcaatggtatgatcttggctcactgcaacctccgcctcctgggttcagtgattcttctgcctcagcctcccaagtcgctgggattacaggtatgcaccaccatgcctggctaattttgtatttttagtagagacgggggtttcaccatgttggtcaggctggtctcgaactcccgacctcaagtgatggtcaggctggtttcaaattcccaacctcaagtgatccgcccgcctcagcctcccagagtgctgggattacaggtgtgagccactgcacctggcccatggcttcttagtctatgggttgcagctgtgactggccatctgcacttaggtaagctcagggttccctgagttaaaatcaaagtgccccatgccttccagttgtcccccaagagcctcactgtgtctctctgcttctcagccacgccttgcaagagtcatctgcccttgatcatctgttctcacctcccactccttccctgattcggggcttgccggcttccgtccctgtcaggctcctgaaactcctctgaccaagatcatcagtgacctctttacctctgactgtcccctctgacttgtcatcttggcagcctttgtcacagctggccttttcgtttccctccccaaccctgaggggcaatgcctgcttccctgaacctgagcctcacatccttcggaccctgcctcccagctgatccctcctagcctcttacccttcactgtgcctgagccctccaccttcatgaagagctcatagttaccatattctcactctgtgccctgcgtataaatgaatttgctcatttagtccttacagcaaccctacatggtaaaacatttttgttttgttttgcttctttgagacagggtcttgctttatcagtcagtctggagtgcagtggcgtgatcacaactcactgtagcctccacctcccaggctcaggtgatcctcctaccttagcctcccaagtaactgggactccaggtgtgtgccaccacacccggctacttttatttatttatttattttagagacggggtttgacatgttgccctagctggtcttgaactccaggactgaagcaatcagcccacctcaggctcccaaagtgctgggattaccagcataagctaccatgcccagcaggactgcttttttttttttgagatggaggagtctcactctgtcaccaggctggagtgcagtgatgtgatctcggctcactgcaaactccgcttcctgggttcaagcgattcttctgccttagcttcccgagtagctggactacaggcatgcgccaccacacccagctaatttttgtatttttagtagagacgggcttcaccatgttggccaaggtggtctcgatctcctgacctcatgatccacctgcctcggcctcccaaagtgctgggattacaggcgtgagccaccgcgcctggccaggattgctttttattcccattttatggatgtggaaactgaggcacagggagattaaacggacatgcttaaggtcacccatcttaataagtgacaaggttagggttagacctcaggcggtctggcctcagagtacactgccttcagattcatctgttaatctggtctaatcgatagtcagtgagcacttcctgggggctgggccctggctgggggtctcagccctactctcgagcctggcaggtttagggagagagtctggggtggctacaagagaagcaaaaagcatttgcaggagctaaagtacacatgattcacaattgaaaatgagtaatgatctctcctgactggggctgcacagatcacagggtttaatgtcacctacctgacattttacagctcaacatctgttacacaaagttataatctgcaactgggaaaagtgtattcattttattttttgaatatataattactcacgattttaaaaatcaaaatataggctgggcacagtggctcacgcctgtaatctcaacactttgggaggccaaggcaggcagatcacttgaggtcagaagttcaagaccagcctgggcaacatggcgaacctccccatctctactaaaaatacagaaattagccaagcatggtggcaggtgcctgtaatcccggctactcaggaggctaaggcaggagaatcccttgagcctgggaggcagagattgcagtgagctgagatcacgccactgcactccagcctgggtgacagagtgtgactccatatcaaaaaaaaaaaaaaaaaaatcaaaatatagccaggtgctgtggctcacaccagtaattccagcactttaggaggccaaggcaggaggattgcttgaggccaggagttcaagaccagcctggacaatatagcaagaccccattgctaaaaaaaaaaaaatcaaaaaattagctggatgtggaggtgtgcacctgtagtcccagctcctctggaggctgactgagctgggaggatcctttgagcccagaaggtcaaggctgcagtgaaccatgattgtaccactgcactccagcctgggcaacagagcacaagactttgtctcaaaaaaacatttatcaaaatacagcaaggcgtgaagtgagaagtcttactcctgctcttttccaatccactcttccccacatctaccatggtaaagccctttcgttagtttcttttgtatccttccatcattttttaaatgaaaatacaaacagatatttttgtttttctcgttttgtacataataggtataacatcactggtctgcattatttaataacatattctggagatataggaagtgtcgtcattcttttttacaggtgtccaatattccacgctgtgtgtatattatggtttatttgctattccttgttgatggacactggctttattcccaatgttttgctatacaacccatgttgcagtcagggctgtcatggatagttgcacccattgtgcactgcacaaggatgtcatttataccacagacattttacatttgtacatgttttactgcagagttccagcagatggagggaaatgtgctgaggaaggctgtagtatttgggcctaaagcaatgctggctataacaattactcttgctacactttgagaggctgaggcatgtggatcacctgaggtcaggagttcgagaccagcctgaccaacacggtgaaaccccatctctactaaaaatacgaaaaaatagcgggcatggtggcatgcacctgtaatcccagctgcttgggaggctgaggcagagaattgcttgaacccgggagttagaggttgcagtgagctgagattgcgccactgcactcctgcctgggcgacagaacaagactcagtctcaaaagaaaaaaaaaataagtagcattgttctataatttcccaagttcttcatggttgccagagttcttgacagtttacaaatcacatcttcattgatgaagtactttgtagatttcaaaacatctactatagcttggaaggccctttctggtgtttgaaatcacattttatttatttatttatttaaatgtttaattatattaacagagatgaggtctccctatgttgcccaggctggtcttgaactcctgggtttaagggatcctcctgcctcagcctcccaaagcgctgggattacaggaatgagtcacctcacccaacagaaaccacattttaggttactgatttattcctggtcagtaaacagtcttgaggttatcttcattgttttcctatctgcaaattttatttgtctcttaattaaaacacttcctttttaaagtgtctttactgaaatagaatgtacataccataaaatccacccatttaaaatgtacagttcagtggtttatagtgtgttcacagaattatgaagccatccctgcaatctaattttagaacattttaatcatcctttgaaaacgaaccccatacccattagcagtcatttcccacttcccccaccccagcccccggtaaccactgatctttctgcctctatagatttgcctattctgaacactgcatataaatggtatcataaaatatatatggtcttggccagacacggtgggtcacgcctgtaatcccagtactttgggaggtccaagagagtggactgtttgagtccaggtgtttgagaagagcctgggcaacatggcgaaaccctgtctccactaaaaatacaaaaaattagccgagtgtggtggcacatgcctgtagtcctagctacttgcgaggctgaggtgggaggaccgagaagttgaggtcgcagtgagtcctgaacacaccactgcactccactccagcctgagcaacagagtgagaccctgcctcaaaaaaaaaaaaaaaaaaatgcatgtgtgtgtgcgcacgtgtgtgtgtatgtgtgtgtggccttaaaagacgttccttttatttaacaaaccacaatgtcatcactcctaacccaaaataaaacagtacaaataaaaaagtcacagtcctttaaatcatcaaatatctagtgagtgtgcaaatttccaaatctcataactttcatgtaactatcaggattttttgtagcttctttaaatcagaatccaaacaagggccacccattgcaattggctgatactttttaaaatcatctttcatctcttgcttcccctctattatcttttctttttccttgcaatttatctcctggagatccagtcctgcagatctttactgtccaacagaaatacaatatgagcaatatgtatatttttaaattttcttcttttttttgagacagggtctcactctgttgtccaggctggagtgcagtggggcaatctcagctcactgtaacctccacctgtcaggttcaagtgattctcctgcctcagcctcctgagtagctgggattacaggcatgcgccaccacacctggctaatttttgtatttttagtagagacaaggtttcgccatgttggccagggtagtctcaaactcctggcctaaagtgatctgccctcctcaccctccgaaagtgctgggattacaggcgtgagtcaccataattttaaattttctaatagccatgttttttaaaaagtaaaaagaggaccggcatggtggctcgtgcctgtaatcccagcactttgggaggccaaggcgggaggatcacttgaggccaggagtttgagccagcctgcgtaacacagcaaaaccctatctctataaaaactttaaaaaataaccaggtgtagtagtgcatatctgtagtcccagttactggggaggctgaggcaggaggatctcttgaaccttggaggttaatgctgcagtgagccatgttcatggcactgtacttcaacctgggcaactgagcaagactctgttaaaaaaaaaaaaaagtaaaatgaaacactacacataatctagtacactcaggatattatttcaacatggaatcaatcctgtttatttatttatagagatggggtcttgccatgttgcccaggctggtctcaaactcctgtgctcaagcaatccaccctcctcagccacccaaggtgctgggattacaggcaagagccactgtgcctggccataatcaatctaaaaaatgattagctcgacatttttcattcttttttcacactaagtctatcagtggatagtgctgtcctagttgtagagcttcccatagtctggacctgaccaatgcgtccttgtggtgtcatttcatgtgttcctgtgtcccctgggtttcctccaaagtgggactcagccaaagttcgagcagattcagatttgggtgtaaggagttttttagccagaaccttcctatgtggggctactgtatacctccaccaggaggcacctcctttccagatgccagcagctgtttctgctcaacactcagacatattcattcattagagattgcaaaatggcgatagtctcatttcttttttttttttttttttttgtgacagagtctcattctgtcacccaggctggagtgcagtggcatgctctcggctcactgcaacctccgcctcccaggttcaagcgattctcctgcctcagcctcccaaagtgctgggattataggcatgagccacggcgcccagcctcttagttttcatgatgcttccttcacttgacaaatgagtatgagtacctactgtgtgtcaggcactgccctggtcctgaaggtacagcagtgaacaaaacagagagcccactgtgggggctgatagtccagtgggaaggggcagatgcaaataacgaaatacacgaagtaattgcaggttataatctgtggtctgaagggtgtgggagtgagcagggtgtggtaagccctgtaaaccggctggtggcggaaggccttctgcaggaggggacagcgaagctgagagttgaaagataccatatgactcagcgaggctgtggtgtcccaggcaaaggggacagtaaatggaaaggctgaaaaatgggaacaagagggacagagagcagcctgggcaacatggcgaaaccaaaccctgtccctacaaaaaatacaaaaattagctaggcatggtggcctatgcctgaagtcccagctacttgggaggctgaggcaagagaatcacttgaacccaggagggggaggttgctgtgagccaagatcgcgtcattgcactccagcctgggtgacaagagcgaaattctgtctcaaaaaaaagaaataaaaatacaaaaattagctaggcatggtggtgcatgcctgtattcccagctactcgggaggctgaggcaggagaatcgcttgaacccgggaggcggaggttgcagtgagccgagattgcaccactgcactccagcatgggcaacagagtgagactctctcaaaaataaaataaaataatacaataaaatataaaataaaataaaatactagccaggcacgatgactcatgcctgtaatctcgatactttgggaggctgaggtgggaggatcgcttgagcccaggagttcaagaccagcctagaaaacataatgagaccttgtctctacaaaaaaactgtttaaaaaattagctgggtatggtggtgcatgcctgtggtcccaacttggaaggctaagacgggaggatcacttgagcccaggaggtcgaggctatggcaagccatgatcactccattacactccagcctaggtagtagagacagactttgtctcaaaaaattaataataaagtaaaacaactaaaagactataagtagactgtaacacaaagaaaggataaatgccagagggaatggataacgcattaaccctgatgtgagtacgtattgcatgcctatatcaaaatagttcatctaccccataaataaatacaactactatgtacccacaaaaatgaaaaataaaaaggcctggctcatgcctgtaatcctaacactttgggaggccaaggcgggcagatcacttgagatcaggagttcaagaccagcctggccaacatggcgaaaccccatctctactaaaaatacaaaaattagcttggcgtggtagcacatgcctgtaatctcagctactcagaagactgaggcaggagaatcgcttgaaccctggaggcagaggtttcagtgagccaagatcacgccactgcactccagcctgggtgacagagcaagactctgtctcaaaaaataaaaataattttttaaaaaaatagtccaggtgtggtggctcacacctgtaatcctagcactttgggaggcccaggcaggcagatcacctgaggtcaggagttcaaggccagcctggccaacatggcgaaaccctgtctctactaaaaatacagaattagccagtgtggtggcacacgcctgtagtcccagctactcaggaggctgagacaggagaatcacttgaacccaggaggcggaggctgcagtgagccaagatcgtgccactgcactctagcctgggcaagacagagcaagactccgtctcaataagtaagtaagtaaataaataaataaagggatgggcaatgaatgatgacacagagagatcagcaaatcacaagagcaaagtctaggagtgaatggaggtgatagtgtcccaggcgcctgtggagaggtgggcttctttttttttttttttttttttttgagacagggtctcgctcttattgcccaggctaggtgcaatggcacaatcttggctcactgcaacatccgcctcccaggttcaagccattctcctgcttcagcctctcaagtagctgggattacaggcacgcaccatcatgcctaactaatttttgtatttttagtagagacggggtttcaccatgttgtccaggctggtctcgaactcctgacctcaggtgatccacccgcctcggcctcccaaagtcctgggattacaggcatgagccaccacacctggccagaggtggatttttgagacagacagtgtcacactgctcatgatagaggggtaggcaagcagacgaggtgagggcagaaggtgaggggttccggtgtgattatgtctccatgctctgtggtttctagagcccttcatgatttgcaaagcatgttactcatttagaaagcattttgcaaagttctggggtttttacaaagcacttttgagagccagaaaattttgcttctgttcataccccagagcaacatttctcacactgcatgttgctacccgtctggaggtaatgaaattaatttagcaatgcgtaactcgtgaccagcatctttagaaataaaatagaacactgcagagtgtgctacacagcaaaggtcagaattatgtcatgaaacctttttttttttttttgagtcacattgtaaaatgtattcttatggttgagtgagtgcggtcaagaacattttatgctgctctagagaacctcttgcaaaaatgcatgggcaatcagcacaagaatgttcaagaaaagtgttgtctgaaagaaatctgtgggtgaacttggtgatttatgcttgtaatcccaacactttgggaggcggaggagggcaaatcacctgagttcaggagtttgggacaagcctgggcaacatggcaaaaccccgtctacaaaaaaatacaaaaattcaccaggcacagtggcatgcacctgtagtcctagctactcaggaggctgaagcacgagactcatttgaccctgggaggtggaggctgcaatgagctgagatcgtgccactgcaccactccagcctgggtgaaagagtgagaccctgtctcagaaaaaaaaaacaaaaacaaaatacaaatctggaagcaacctacatttccattagcaggataacagataaagagtgttatggctgggcgcggtggcacacacctgtcacccctgcactttgggaggccgaggcgggtggatcacctgaggacaggagttcgagaccagcctggccaacatgatgaaaccctatctcactaaaaatacaaaaaattagccaggtgtggtggcgggcacctgtaatcccagctgctcaggaggctgaggcaggagaatcacttgaccctgggaggtggaggttgcagtgagctgagatcatgccactgcactccagcctgggcgacaagagcgaaactccgtctcaaaaaaaaaaaaaaaaaaaaagagaaagaaaaagaaaaaaaagcaagtttcagctgaggtgggaggatcccttgagcccaggagtttgagaccagccttggcaacatagggagaccttatctctacaaaaaaaaattaaaattaaaattagccaggtgtagcggtgtgtgcctgtagtcccagctgctctggatgctgggtacttgagcccgggggtggggatggggacgagaggggatgtcttgaggctgggttgagctgtgattgcgccactgcactccagcctgggcgacacagcgagaccttgtcttaaaaaaaaaaaaaaaaagagagagaattgaggctctccaggtcaccccactgacctccctgcccgcccccaggccatggacagccagaagcagttcagcggtccagaaatccagttcctgctttcgtgctccgaagcggatgagaacgaaatgatcaactgcgaagagttcgccaaccgcttccaggagccagcacgcgacatcggcttcaacgtggcggtgctgctgaccaacctgtcggagcatgtgccgcatgaccctcgcctgcacaacttcctggagctggccgagagcatccttgagtacttccgcccctacctgggccgcatcgagatcatgggcgcgtcacgccgcatcgagcgcatctacttcgagatctcagagaccaaccgcgcccagtgggagatgccccaggtcagggaacccgcgcgcgtgcaagctcgcctcctggggcttcgggcatgcgggtgctcacttcctgcaccctcagaccccacgggggctgtgcgtgcctcgcatatctgccctgctccggcaagcccacgcccacccttttgtacacatttcgtccagctgcgcccttgcacatccctggctcgcccctggccacttcttgcggacctggcccacacaaggatgcacaccccttgggcatgaagcagggtcagtgtgtcctgactgtggctgctcacacgccatgctttccccttacacccacaccctgggagctctggcaggcccttatagccctgatgcagccctacccacactctcacctcctcgaacctgcatggcgacacaccccttgctcaccttcccagtagcccccggcgtgccgtctcttggtcctggcccgctcatgctcactcttgtacacgctcgccttgggggctctggggtgccctggcatgctgacccacccttcaccagtcatcacgtttgcccccagatgccttctgaagtcctagcatatgtgtaccccaacttattctgggcccacacgtgggtgcacacctcttgcacacacaccctgaggatgccaatgagccctctcagaaccctggcatgcttcatttgttcactgtccacttgccctcactgtagccctggcacaaccatgctcacccatgcacacttgggccacggtctcaggctcacccagaagagccctcagacctactctctaatctgacatgccctatctcagctcctcctatgcccagcccacaaatgcttgaacatccctcacacactcgcttgccccaagggtacactcacgtggtcccggcatgtccccagcagagctggcacacctggctgacatatggttcccctccccattccctcacactccccacacgcccctgacacaccctcacctcattctcttgcacacacacttgcttgttgttcctcagatgccgccaggtacttgcacaccccttcttgtctcacacacatagcccgggaggtttgcgcacccgtcacctccttcatgagtgggcccttcatatgtctcctcaggggacaccagctcatgcacgcgggctcatgtcccacacagagccctgtcctcatgttctgggagccagtacacaaacccttggctccccttcccacattcatgcctgcctcacgcacactgcataactgcaggcccctctcacactcatactcctcctgtccccccacagagtcccaggcccttgcacacctgccccgtgtgcccacgtccaccgtgcacactgagcctctcgtggttgcacacttttggcatcttcccatgccgccacgccctccttactcctgatccctccctggcccccggtgtctcctcacatactccgcaggaacccttgagatcttgcacactcatctgtgcccctcggggccccactgcatacacacccccatctggcacacaagtggttgcagcatcctggcacccaggatgtccacacatccctgcctctgcaggaagcccctgttcaccacggcccttcccactcattctttgcacgtgctgggggagctctgccctcctctcttcctctgaccctgcgtgctccccatacaaacactctttgccttagtgctattcctccaaacacccgcttccttctgctcaccccttcccattccactttcccctgcttctcaggcatccacgtatgcccatgtggccttggagcacctgtggggcagtataataataggtaacactacggtgttgttgttgtttgagacagagtttcgctcttgttgaccaggctggagtgcaatggcacgatctcagctcactcaacctccacctcctgggttcaagcggttttcctgtctcagcctcctgagtagctgagattacagccatgtgcaaccatgcccacctaatttttatattttcagtagaggcggggttttgccatgttggcaaggctggtcttgaactcctgacctcaggtgatccgcccgcctcggcctcccaaagtgttgggattacaggtgtgcgccaccgtggcctgcccactatacagcatttatcaggcaccgggcgctgttctaatcatgcagcatctattaactcatttaaccctcacaccaaccctataatgtaggtcctattatgcccattttacagaggggaaaacggaggtccagagagttaattcaaaatcacccagctactcagtggcagaatcaggatttgaacccaggcaggctggctgcagagcctttgcctttaagcactatgctcctcctctcaaggaagctaaacacatccattctggagccagctctctgggggttcgaatcctatatgtgccaccttgtctgtgtcacctgggcatgtaactttctgggcctccctgtcctcatctataaaatgggaagaaaacccgctagccctaggcttgtttgtgaggattaaatgagttttatggaaactgcttgtatggggcctggccttattgaagcatttacaggagtacccacagtgagtgctctctataaagctctctctataggtttgctattgataatcaaaacaacaacttggccaggcgctgtggctcctgcctgtaatcccagcactttgggaggccaaggccagaggattgctcgaggccaggagttcgacaccagcctgaccaacacagacagaccctgtctctgcaaaaaaattttttttagaaattagcaggccagtcatggtggcttatgcctgtaatcccagcactttgggagggtgaggcgggcagatcacttgaggccaggagttccagatcagcctggccaacatggcaaaaccctgtctctactgaaaattcaaaaactcagcccagcatggtggcaggcgcctgtaatcccagctactcaggaggccgaggcatggggatcatgtgaaccctggggacgaaggttacagtgagacagcgtcacttcattccagcctaggagacagagctagatcttgtctttttttttttttttcttgagacagactttcactctgttgcccaggctggagtgcagtggcacgatcacagctcatggcaacctccgcctcccgggttcaagttattctcctacctcagcctcccgagtaacggattacaggggtgcgccaccacaccggctaatttttgcatttttagtagagacgggggtttcaccatgttggccaggctggtctcgaactcctgaccccaagtgatctgccagcctcagtttcccaaagtgctatgattacaggcggagccaccgcgcccagcctgaccctgtctcaaaaacaaaataccaacaatgcatttagaacagcgcctgccgcggtgaccccttgtagctgccactgcgctgtcgctgctgtccgagcccccgctgacggcgccctatcctgtctgccgcccctcgcttcaggtgaaggagtccaagcgccagttcatcttcgacgtggtgaacgagggcggcgaggctgagaagatggagctcttcgtgagtttctgcgaggacaccatcttcgagatgcagatcgccgcgcagatctcggagcccgagggcgagccggagaccgacgaggacgagggcgcgggcgcggcggaggcgggcgcggaaggcgcggaggagggcgcggcggggctcgagggcacggcggccacggcggcggcgggggcgacggcgcgggttgtggcggccgcaggccgggccctgcgaggcctcagctaccgcagcctgcggcggcgcgtgcggcggctgcggcggcttacggcccgcgaggcggccaccgcagtggcggcgctgctctgggcagcagtgacgcgcgctggggccgctggcgcgggggcggcggcgggcgcgctgggcctgctctggggctcgctgttcggcggcggcctggtggagggcgccaagaaggtgacggtgaccgagctcctggcaggcatgcccgaccccaccagcgacgaggtgcacggcgagcagccggccgggccgggcggagacgcagacggcgagggtgccagcgagggcgctggagacgccgcggagggcgctggagacgaggaggaggcggtgcacgaggccgggccgggcggtgccgacggggcggtggccgtgaccgatgggggccccttccggcccgaaggggctggcggtctcggggacatgggggacacgacgcctgcggaaccgcccacacccgagggctctcccatcctcaagaggaaattgggggtgagagagcaggcggggttttggggttttggaaagatgggggattggagggaggaagagagcccggctgggtggagacacacacagaggagagaactggctagggggatgggcacacgcacccacggaggacgcacccatggaggacgcacacggggacagcgggcgccgggcaagagagacgctcagagacagagggatactcagacccacagagaaagagactcagagatggagacctggagaaagggccggggagagagagtgcagggccggacagagtgcagggccggacagagtgcagggcccggagaggtagagaaaatgatacctgcagagccagagagagtaagaaacccagagaccaaattagagggcaggaaagaccaaaactaagccaggcgcggtggcttacacctgtgatcccagcactttgggaggccgaggcgggccgatcacctgaggtcaggagtttgagaccatcctggccaccgtggtggaaccccgtctctactaaaaatataaaaattagccgggcatggtggtgtgcgcctgtaatcccagctactcgggaggctgaggcaggagaatcgcttgaacccgggaggcagaggttgcagtgagccaagatggtgccactgcactccagcctgggcgacagagcgagactctgtctcaaaaaaaaaaaaaaaaaaaaaaaaaaaaaggaaaagaaagaccaagactaaaaaaagtcccgagacagggtcagggccactaggaaaagaccctcggagatactcgttgtgggaatgaagtacaccgtggaggaagggaccccaaacatcctcaggcccttggtgctgggaatgccttgggaatgtggaggtcaaggtggtgggaagccctggggacaagcagagctgcacttggagtcagcccgaccctgcgcagtgctttgggcaaagggcttcacctcgatgagcctcagtttcccctctgtaaaacgggaatcataatctgcctctttctggtggagggaagtgtaaaacttagattacccaggggaaataagagagaaaggagatgagaggagcaggcaggcagcctgagaagcgcttagggtgaggactcagccctgatgcttgccctgtccctaggtggatggagtggaggaggagctcccgccagagccagagcccgagccggaaccagagctggagccggagaaagccgagtgagtggccttggggctgaggggcctagcccctatcactgcctccctcctagagtaggagcctccagaggtcaggccccaaggctgtcctggccaccctgtgtcctcggcatcacccagcccagactcaggcacggaggaggggctctgagtaaaagaatcaagaaataaatgctccaacctgggcaacataaaaaaaaaattaaaattagccaagcatggtggtgtgtggggaggctgaggtgggaggatcacttgacccctggaggtggaggctgcagtgagccctgatcgcagcattgccctccagcctgggtgacagagcaagaccctgtgtcgaaaaagaaaaaaaaatatggagagatagaaaaatgaaaactcccatctaactgccaggccttcgcatgtgctttcccgctgcctggaacacaggcccccatgcctactctgagtctttctcatcctttccaattctccaggacacctgaccccctcctaagttgaggaggtgtctcctccagattcccacaaccccctgagcttcctccatcccagccccgaccactctgggctgtcactgcctggtgtcactgtcactgcctgtctcccacattggactggagccccataagggcaagtcctgattatctcatcatcccatgtacccagtaccatccaaacctgggccaggcacagggcgggcccttggtgaatggttttgaatgaatgaactcatgcattgcctgcccaggcacctcctgacctctctctgtcctgccctgcagtgccgagaatggggagaaggaagaagttcccgagcccacaccagagccccccaagaagcaagcacctccctcaccccctccaaagaaggaggaagctggaggcgaattctggggagaactggaggtgcagagggtgaagttcctggtaaggatccagccaggtcacctgaaccttcttctccccgggagccccacctctggtgcccacctctcctgctcaccttgttcttgagttcatctgttcaagctcgtctctaagaagaaccctagctggggaaagggcagaggtatccccagacctgcggacagggtagcattttcagatggccctcacttggttccttgtcccttccctgctcactatccttattccaacctccatacctctgttcatcggggccacccacccacacttccacctccatcctctgtccagagctacattcagtgaggccaccactctggccttcccaccgtggcctgttcttggctgtcagcccttacagtctcagtccctccaccactcccagtgctgctgtggaggtctgagctctcccaattcctggggaagcgttcatctcatccaggccaggaagaagggtgggtgttgggaggcaggtcccagggttccctccatcctgtctcccctccaggcctggcccgataggagggggtgagggaggctgggcacggtgggtcacacctgtaatcccagcaccttgggaggccgaggcaggcggatcgcctgaggtcaggagttcaagaccagactggccaacatggtgaaaccccatctctactaaaaatacaaaaaaaaaaaaaaaaaaaaattagccagccatagtggtgcatgcctgcaattccagctactcaggatgctgaggcatgagaatcgcttgaacccaagaggcagaagtttcagtgagccgagatcgtgccactgcactccagcctgggcgacagagtgagactctgcctcaaacaaagtggtggtggggggcgggggggcggtgagggaatcatgtggaacgaaggtggttccgtcagaatttgtgggaagaatgagggatggagggaaaggtggagagaaagagggagagatggaagatgttcctggccgtgcgagggggctcatgcctgtaagtccagtactttggaagtccaaggtaggaggatcactggagcccaggagtttggggcaagccagggcaacatagggagatccctgtctctacaaaagaattttttttttttttgagacggagtctcgctctgttgcccaggttggagtgcagtggcacaatctcggctcactgcaagctctgactcctgggttcacgccattctcctgcctcagcctcccgagtagctaggactacaggcgcccgccgccacgcctggctaattttttgtatttttagtagaaacggggtttcaccgtgttagccagaatggcctagatctgaccttgtgatccacccgccttggcctcccaaagtgctgggattacaggcgtgagccactgcacctggccgaatatttttaatctttttttttttttaattactgctccttgcagagcagggctaccctctaggcagtgcacccagagtagccaaaaatgtttttttaattagctgggtgaggtgacacatgcctgtggtcccagctgttcaggaggctgaggcgggaggatcacttaagcacaggaggttgaggcagcagtgagctatggttgtgtcacttcactccaacctgggtgagagtaagaccttgactcaaaaaaaaaaaaaattccctttcatcttctgtaaagcaggcagggcgacaggtggggtgacctcactcaggaagcagcatggccaagtggcttggagcttggactctggaggctgactgcccgggttcaaatcccatctctgccactcgttggttatgttaccttgagcaagacaccacttccctgagcctcagtttcctcatctgtaaagtgcgcataacagtagtgcccacttcacaggggtgtactgagaattaaacaagctcatgcaaataaagttcttagcccagatgttggtataagcaagcactcaacaaataggaggttgaggccagccgaggtggctcacacctataatcctagcactttgggaggctgaggtgggtggatcacctgaggtcaggagtttgagaccagcctgaccaacatggtgagaccccgtctctactgaaaatacaaaaactaactgagtgtggtggtgcatacctgtaatcccagctacttaggaggctgagtcatgagaatttgaacccggtaggcagaggttgcagtgagccgagatggcgccactgcattcgagcctgggtgacagagtgagaccttgtctcaaaaataaataaataggctggacgtggtggctcaagcctgtaatcccagcacttaggctgaggagggcggatcacgaggtcaggagtttgagatcagcctggccaatatggtgaaaccctgtctctactaaaaatacacaaattagctgggcgtggtggcacacgcctgtagtcccagctactcgggaggcggcagcagaggaattgcttgaacccgggcggcagaggttgcagtgagccaagatcgcaccactgcactccagcctggacgacagagcaagactctgtctcaaaaataataataataataattaataaataaataggaggttgtaggaaagatattgagagcccaggtactttgattgcaggtaaatgatgggatgaattctccagggaagaggctgatctgtgagcgctttctctctttttctcttctctctcagaactacctgtcccggaacttttacaccctgcggttccttgccctcttcttggcatttgccatcaacttcatcttgctgttttataaggtgctggtcctgaagggctgggagggtcaggcccttttccatgctgtgggatgggaggctcagcccctatcagaatttcagggttcctccactgaagggataaggtattgggctttgggtcgttaggagggttcaggctggacacctggatcctgggacccccctccatgggggtgagtaggggatatctggatccatctgggacagaagcctgagtgtctgtgggagttagagcaggagcaggagctgagttctctgctcagctcggccacatgccagtcctgtgcgcctgggtgcaggccctcagctcttggcaacacccactgattctgttaagcatctttggtttcacataagctaaacagaagtttgcagggaggaagaaatgggccactcacagaatggaaggaatgggttaagaaccaggcctcctgaaggacaaagggacccttggggtcttgccaggggtctagataacaggacagtaaggtagactagagagatcgaagcatggcttctgtgggacccagaagtcccacagtgggactgcccactggcgcatgacgataggcaaggtgcttaccatccctgtgcctcaactccctcatctgtaaaatggaatacctcttagagctgtggggattgaaagaggataaggcaccaggcacagtggctcacgcctgtaatcccagcactttgggaggccgaggtaggtggattacctgaagtccggaattcaagaccagcctggccacatggtgaaaccccgtctctactaaaaatacaaaaaaaaattagccaggcctggtggcgggcacctgtaatccaagctatgcaggaggctgaggcagtagaatcccttgaacccaggaggcaaaggttgcagtgagccgagattgcaccactacactccagcctaggtgacaagagtgaaactccgtccaccccaccaaaaaaaagaggatgagtgtgtgtaaggcagttagagcaacagtacctggcatataaaaagcactgtgtaaatgtttagctgctactaattttcatgttagtgttaatattagtgggcagtctctttagggctccactatcaagatgaaccaactctgtcttcagttctgtgccactcagttcaataggctaattcccaggtcagagtctgatttgctagctacagccctaggcccaacccttgatcttgattgacagccacaccaagactgtatctggtatggtcccagtccaatctcgggaatggaggctcaattttgtgagtgggctctgcatgtggcagacccacagatgaatctctgtccccatttcaggtctcagactctccaccaggggaggacgacatggaaggctcagctgctggggatgtgtcaggtgcaggctctggtggcagctctggctggggcttgggggccggagaggaggcagagggcgatgaggatgagaacatggtgtactacttcctggaggaaagcacaggctacatggaacccgccctgcggtgtctgagcctcctgcatacactggtggcctttctctgcatcattggctataattgtctcaaggtgggcccatggccatggttctggggcaagggcttattggctgggtgggggtgggggcagtgctggagcactggctggggctgggggccctcaaagtggttgggacagagggggcctagggttggggtgagggctggggaactgggtacaggattggggtctccagcaaggatgacaggggtctccagtaaggacgacattcagattgggaacggacacggcttatagctgaggaaccaggttctggaccactgtcttgatactttgctattgaactagagttctttgggcttaaaactttcatacatgctattccctctgcctgcaatactttgccctgcttccacctccttgcacctgcctgttttattcatccttcagttctgagttcagacctccctcccttgggaagccccaggtggcatcaggcaccactcctgggctcccacagctcccctgttctcacatcctggcccgatccctctgcctgtgccccacccccattccagccctgacccctatatgcccctacatcccagccctgacacccctgcctgtgcctctccactgccagccccgactgctctgcctgtgccccccaattccagccctgactcttctatctatgccccctatcccggccctgacccctctatctatgcaccacattccagccctgacccccctgcctgtgcctcccccatccctgccctgacccctctgcccatgttccccacatcccagccctaagccctctgcctgggcctcatttctacccttatcactgggaaagcacttctgatgtggggtcacacacagaccccagcaagatgtcatggcttctgctgagactatggtccagccaaggtgcctgacgcccacctttggcctcctcccactatccaggtgcccctggtaatctttaagcgggagaaggagctggcccggaagctggagtttgatggcctgtacatcacggagcagcctgaggacgatgacgtgaaggggcagtgggaccgactggtgctcaacacgccgtaaggacccagcccccacctcagggtggcagcaggaggggacctgggtttccacccagtccaggcctggaccccaaaaaactagggtttcggtccgggcacggtggctcacacctgtaatcccggcactttgggaggctaaggcgggcggatcacgaggtcaggagtttgagaccagcctggacaacatggtgaaatcccgtctctactaaaagtacaaaaattagctgggcgtggtggcgggcgcctgtaatcccagctactgggaaggctgaatcagaagaatcacttgaacctgggatgtggaggatgcagtgagccgagatcgcaccattacactccagcctgggcaacaagagtgaaattccacccccttccccccagacaaaaaaaaaaaaacctagggtttcagtccctgcaggccctgcctcattctccccaagtcttactctttctttccataaaagaggcacatttcccatgcattacagcatctgtgtgggtgaggttggcacacagagattcctagacttgaggcctggaggttcctgttcagtgactctggggtgtgagcccaggaacccgtgttttaaaccctgtctccaggtgtgattcttactcaggtgcaatgagtgcaaaataaaaaaacatggccaggcacgatggctcatgcctgtaatcccaacacttgggaggccaaggtggcagatcacttgaggtcaggagttcgagaccagcctagccaacatggtgaaaccccatctctactaaaaatacaaaaattagtctctactaaaaatacaaaaagtaggcatggtggtgggtgcctgtggtcctagctactccggaggctgaggcatgagaatcacttaaacctgcgaggtggaggttgcagtgagccgagattgtgcctctgcactccagcctgggcaacagagcgagactccatctgaaaaaaaaaaaaaaaaggaaaagaaaaagaaaggaaaaaaaaaaaagaaagaaaagaaatcattaggggccctaggggccgcactcagtggctcacgcctgtaatctcagcactttgggaggctgaggcaggaggatcccttgtgcccaggagttcaagaccagcctggacaacatagagagacctatatctttagaaaaaaaaaactaaaaagttagccagacatgctagcctggctagcgcatgcctgtagtcttagctgtttgggaggctgaggctggaggatggcgtgagcccaggagttctaggctgcagtgagctatgattatgccactgtccttcagcctgagtgacagagcaagaccctatgtctgggggccaaaaaaaaaacaagtaggaattggaagtgcaatgaatcaaagcacttcaaataattgcaaatccgtgaattcataatcaatcatcgctccaccctctcaaaaaacaaaactcgtggctgggcacagtggctcacatctgtaatcaatcctagcactttgggaggccgaggcaggcggatcacgaggtcaggagatccagaccatcctggctaacatggtgaaaccctgtctctactaaaaatacaaaaaaattagctgggcgtggcagtgggtgcctgtagtcacagctactcgggaggctgaggcagaagaatggcgtgaaccgaggaggcggagcttgcagtgagcccagatggcaccactgcactccagcctgggcgacagagcgagactccgtctcaaaaaaaaaaaaaaaaaactcgttggccatatttgaggatgttagggcatcaatttgtcacttggaaaactggtgaataaagggccagaatcatgaaattaaatgaaatcaaccagtatgaggaagcaggcagttgcactggagttggtgctgagttaggctgctgttttggactcctccccacccatcaccacgccagagcctctttatcagagtgccattctgaggtcttttttgcacatctggctctgaatgcaaattctctgcctcatttggggtctagcaaagatggcagtggggtccccactgttcaaggttcctacaagaaaagcagtggagccaggcgcaggtggctcacgcctgtaatcccagcactttgggaggccaaggcgggaggggggatcacctgaggtcagaagtttgagaccagcctggccaacatggcaaaaccctgtctctactaaaaatacaaaaattagccgggcgtggtggtgggcgcctgtaatcccagcactttgggaggccaaggcgggtgggggcatcacctgaggtcagaagttcaagaacagcctggccaacatggcaaaacctcgtctctactaaaaatacgaaaattagccgggcgtggtggtgggcgcctgtaatcccagctactcaggaggctgaggcaggagaatcgcttgaacctgggaggcaaagtttgcagtgagcagatatcacaccactgcactccagcctgggcaacagagtgagactccatctcaaaaaaaaaggaaaaagaaaaacagtggagtttcagccaaccctgtcgtggctgacagctctgatccctctggccctaacatcttatactcacgctttctctctctctctctgcaggtctttccctagcaactactgggacaagtttgtcaagcgcaaggtgagaggacatggatgccctgggtcctggattgggtccctgcctgccaccaggccatcacaggcctgccaagcacttgcttggtgtgtgaccttgggcaagaggtttttttgcctttctgagtagcacctcagtttccccatggggagatgggcatagtaagcttgcttccctttcttgaatgggcacatggaaagagcagagcatcaaggccaagcgtggtggctcacgcctgtaatcccagaactttgggaggctgagatggatgtaacacttgagctcaggaatttcacagcagcctgggcaacatggcaaaatgccgtctctaccaaaaatacaaaaaattagcacggtaccgcatgcctgtagtcccagctactcaggaggctgaggtgggaggatcgcttaacctgggaggcagaagttgcagtgagccaagattgcaccactgcactacagcctgggtgaaagagtgagacctcatctcaaaaaaaataataataacaaaaaataagaaagcatagcatagtgcctggcacagagtgaatactcaagaaatactggttgaggccaggagcagtggcacacgcctgtaatcccagcactttgggaggccgaggtgggcagatcacttgaggtcaggagtttgagaccagcctggacaacatggcaaaactgcatctctactaaaaacacaaaaattagctgggcacctgtaatcccagctacttgagagactgaggcaggagaatcacttgaacccgggcggcagaggctgcagtgagccgagatcgcgccattgcattccagcctgggtgacagagcgagactccgtctcaaaaaaagagagaaatactagttgaaagagaggaagttagcaatatgtcttaagcacacacactctggaaccagattgcctgcttttcttttgtttttttctttgagacggagtctcgctctgttacccagtctggagtgcagtggcacaatctcagctcactgcaacctccacctcccgggttcaagcgattctcctgcctcagcctcccgagtagctgggattacaggcacccaccaccacgtctggctaatttttgtatttttagtagagacggggtttcgccatgtgggccaggctgatctcgaactcctgacctcaggtgatccacccgcctcggcctcccaaagtgctgggattacaggcacgagccaccgcgcccagccgattgcctgcctttctatttctggcttattgacctttctgtacctcatactcaaagtggggtaataatacggccaaccctacagggttgttgtattatgtactacatgagcagtatctggcatataggagaacactagatatgttggctgttactataattcgttcactcatatttacggagcacctattatgtgccaggaacagttttagaaacctgggatcccgtgttaaacaaaacagtgattctgaccttcaagttggaaagatagatgatgaacccaagtacagtatgtcagtggtgataaatgctgtagaaaaaaacaaagtgggctgggcacggtggctcacgcctgtaatcccagcactttgggaggccaaggagggcagatcacttgaggttaggagttcaagaccagcctgaccaacacagagaaaccccgtccctactaaaaatacaaaattagccgggcatggtggtgcatgcctgtaatcccagctactcaggtggctgaggcaggagaatcgcttgaacccgggaggcacaggttgcagtgagcagagatggcgccactgccctccagcctgggtgacagagggagactgtctcaaaaaaaaaaatgcacctcccatttctcactcagagtttggagtgtccccagaacccccttgcaggccacgacacacacccacactccagctgtgtctacacagcctgatgctctcttgtgcaggtcctggacaaacatggggacatctacgggcgggagcggattgctgagctactgggcatggacctggccacactagagatcacagcccacaatgagcgcaagcccaacccgccgccagggctgctgacctggtgagcccaggacacccctgcacaggcctggggcatgcaggggaggtgactggagtctgacactcaagcatctctccccacccccgcccccacaggctcatgtccatcgatgtcaagtaccagatctggaagttcggggtcatcttcacagacaacgtgagcaggggcccacagactggggagggactctgcaggggtggggcgttaggagggttcccaacgtcgggtgttcctgaccaaagaatgactcctgggaccctgagtggctgtgaccctagggtatcttcttatccacacaaggctccttatccccctagacatcttattagtattattattactatttttttttaaatagctgggattgggtgtggtggctcacgcctgtactcccaacactttgagaagccaaggctggtggatcactggagcccagagtttgagaccagcctgggcaatatagtgagatcctctctctacagaaaatttaaaaattagctggggctgggcgtgctggcttacgcctgtagtcccagcactttgggaggccgaggcaggcagatcacttgaggtcaggagttcaagacaaacctggcactgggcatggcagcaggtgcctgtaatcccagctactcaggaggctgaggcaggagaatggcttgaatccaggaggtggaggctgcagtgagccaagatcgcaccactgcactccagcctgggcgacagaatgagaatccatctcaacaacaacaacaacaaaaacacaaaaaattagccaggcagacaggcacagtggctcaggcctataatcccagcactttgggaggcggaggcagaggtttgcttgagctcaaacgtttaagaccagcttgggcaacttttgtagagacggtgaaaccctgtctctacaaacaatacaaaaattagccaggcgtggtggtgcacacctgtagtcccagccactcaacaagctgcggtgggaggatggcttgagcccaggaggcagaggtttcagtgagctgcatgtgcaccactgcactccagcgtggataacagagcgagaccctgtctctaacaaaaaacagagagtggccaggtgcggtggctcaggcctgtaatcccagcactttgggttgggaggccgaggtgggtggatcacttgaggccaggagttagagaccagcctggccatcatggtgaaacccatctctactaaaaatacaaaaattagctgggtgtggtgacccacgcctgtggtcccagctactttggaggctaaggcaggagaatcgcttgaacccgggaggcggaggttgcagtgagctgagattgcaacactgcactccagcctgggcaacagactaagactccatctcaaaaaaaaaaaaaaaaaaattagctgggtgtggttacccacacctgtggtctcagctacttggcaggcttagcctccttcacttgaacctgagaggcggaggttgcagtgagctgagattgcgccatagcattccagcctgggtgacaagtgtgaaactccatctcaaaaaaaaaaaaaaaaaaagacagaggaagagatgatggagtctcgctatgttgcccagactggtcttcaactcctgacctcaagtgatgctcctgcctcagccccccaaagcactggggatacaggcatgagccaccacacccggcccagaacatcctttggctccctcagtgtgcccttagattgccagattatttccttctggagggggctctcatctccccgcaggatgccttctcacccggaatgccctgatcctccatgtactccccaaacagagctggcacccgacccccagggcacagctgactctcgagtggcccctaccctccagagtgctcctcgtgtgtccctgccttccccctgacccctggccctgtgtgcccacagtccttcctgtacctgggctggtatatggtgatgtccctcttgggacactacaacaacttcttctttgctgcccatctcctggacatcgccatgggggtcaagacgctgcgcaccatcctgtcctctgtcacccacaatgggaaacaggtgtggggaggacctggctgtggggcgtgggccagcagggaccagcgtggcagtgggtggtgaagggataagggccgggcagctgggctgaggaggggcaaggccaggtgcgctgagccgggggtgtgtggggcagcaaggtagagccacagggactgaaccggggccaggacccagcatgggcagggtggggggagggcaagcccagggcggagctgacctggccccatcctgcccccagctggtgatgaccgtgggccttctggcggtggtcgtctacctgtacaccgtggtggccttcaacttcttccgcaagttctacaacaagagcgaggatgaggatgaacctgacatgaagtgtgatgacatgatgacggtgagcccctcccctagcactctgggacccttccttctcgcatctgttgaaggagttaataatggtacctccaggccgggcgtggtgcctccagcctgcaatcccagtgcgtcgggaggccgaggcgggacgattacttgagtccaggagttggaaaccagcctgggcaacaaagcaaaaatcctgtctctataaaaaaaaatttaaacgttagctgggtgttgtgttgtgtgcctggaggctaaggcaagaggatcacttggtcccagcagtttgaggctttagtgagctacgaatgggccactacactccatcctggcagacagacagagaccctatctctaaaaaatgaaaatagtacctacagtttggcaagctgatgcatgccaggcacattttttttttttttttttgagatggagtctcactgtgttgccaggctagagtgcagtggcgcaatctcagctcactgcaacctccgcttcctgggttcaagtgattctcctgcctcagcctcccaagtagctgggactacaggcgcatgccaccacacccagatactttttgtattcttaattttctttctttcttttttttttgagacagagtctggcccaggctggagtgcagtggcgtgatctcagctcactgcaagctccgcctcccgggttcatgccattctcctgcctctgcctcccgagtagctgggacaacaggcgcccgccaccacgcctggcaaattttttgtatttttagtagagccggggtttcaccatgttagccaggatggtctcgatctcctgacctggtgatccgcccgcctgggcctcccaaagtgctgggattacaggcatgagccactgcgcccggccaatttttgtattcttagtagagacggagtttcaccatgttggccaggatggtctccatctctgcctgtgccgtcgtgatctgcccacctcggcctcccaaagtgctgggattacaggtgtgagccgccgcacctggccatgtcagatactttgaacagtgccaggcatatgagtgctccacacctcttcgccattgtttcaatattatttgagctgaggttttttgttgttgttgttcctgagacagagtctcgttctgtcacccaggctggagtgcagtgacatgacctcagcttactgcaacctctgtctctcaggttcaagtgattctcctgcgttagcctcctgagtagctgggattacaggcgcacactaccacacccagctgatttttgtatttttagtagagatggaggtgggggggtctcacaatgttggccaggcttgtctcgaactcctgacctcaaatgatccacccacctcggcctcccaaagtgctgggattacagatgtgagcaactgcacccggccttatttgagcttttcaaactattattattggaaaggtactcagggagcgtgcccctgccacttatgagccgtgtgattttggggcaggctactcaacctcctccctatgccctgggggcctcacctgtaaaatgagtgtgtaatagtagttgcttttaggactaataggtgctccctggctatcgaagacttaaaagacttagaccattgccttgcacggtggctcatgcctgtaatcccagcactttggggggctgaggggggcagattacctgaggttgggagtttgagaccggcctgaccaacatggagaaaccccatatctactaaaaatacaaaattagctgggcatggtggcgcatgcctgtaatcccagctactcgggaggctgagacaggagaatcacttgaacccgggaggtggaggttgccatgagccgagattgcgccactgcactccagcctaggcaacgagagtgaaactccgtctcaaaaaaaaggaaaaaaaaaaagacttagactagtgcctggcacatcctcaggattatatagatgttagcttctatcatcattatccacaattaaaagtttcacccaggccgggcgcagtgactcacgcctgtaatcccaacactgtgggaggctgaggcaagaggattgcttgagcttaggagtttgaggttgcagtgtgctatgactgcgccactgcactccagcctgggtaacacattgagactctgtgtcaagtttaaaaaaaagtttcacccaaggtatacccagcgttcaatgcacatttatattttctcttctattctaataatggtgatcataacccaaattgatgcgaacttactagagacacaggccacaatccacaattaaaagaatcatttctggggtttatctccaaagatgtcctgcagtctggctccgtgggttcctccctgctctcaggacaaagtccagctcctcaacctgacatctgaggctcttccagacacggcctcgctgcccacagcctcgttctcattatagtcacttatcttagtttttactctaggatgactgtgttctctcacatcctggggacacggaaagaacaagtgtatgccgggcgctgtggctcacgcttttaatcccagcattttgggaggccaaggcaggtggatcatctgaggtcaagagtttgagaccagtctggccaacgtggtgaaaccctgtctccactaaaaatacaaaaattagtgggatgtggtggtgggcgcctataatcccagctacctgggaggctgaggcaggagaatctcttgaaccccggaggcggaggttgcagtgagccgagatcacgccattgcactccagcctgggcaacaagagcaaaactccatctcaaaaaaaaaaaaaaaagaaaaaagtacaaaaattagctgggtggggtgacacgcacctgtattcccgactactcaggaggctgaggcaggagaatctcttgaactcggtggtggaggtcgcagtgagccaatattgcaccacagcactccagcctgggcaacagagcaagactctgtctcaaaaaaaaaaaaaaacatatgtaaagttgttcccaaatgccaggtagaccatgctccctccccacccccactcagacccttcttgtggctccccagcccactgtagataaagtcgaatcaccctgccgtggcttacaaagcctgggaagggctggccctgcctgggtctaaccgcaaaccctcttgctttttgctttctagccgcctggtcctctttcagttcccctaggactgtgtgttttctcccaattcaagccctttgcacctgatgttctctctgtcccctaccccaggcctgacatacacacacaccccattcacttgatacctcacctttccacttaaatgccacatcctacaggaagccccttgaccgcgggctgggccagggcccacagagccacatgcccaggccctgcctcatctctccctgctctcctgcacaggagctctattttccagcctcacccaaccattttcagttcctcacagcagcaggatgtactctttcctcactgatggcgaggcagcatgtggccttctctgctgggaacactctcccaccacccctccacctaaggcctcctttaggtttcagctcacacctgcctcctcttccaggaagcctcacctgatcacctaggctggatcagatgcctccagcgggctgttaaagcttccagtgcttcccctagctcatccctggtcacactgtgcctccccaccccagcctcgaccctctgcctgtgcccctcccatcctcgccctcacccttctgcctgtgcccccctatcctggccctgatccctacacctgtgcccccccccacccatcccggccctcatccctccgtctgtgccccccatccatcccggccctgacccctctgcctgtgccccactatcctggccctaacctctcagcctgtaccctccatcctggccctgacccctctgcctgtgccccccacccaacctggccctgacccttctgcctgtaccccccattccagccctgacccctctgcctgtgcccccccatgctagccctgacccctctccctgtgcccccctatcctggccctgacccctctgcctgtgccccccttatcctggccctgattcccctgccagtgccccccatcccagccctgacccctctgcctgtgccccccttatcctggccctgacccctctgcctgtgccccccatcctggccctgacccctctgcctgcgccccacacccaacctggccctcacccccctgcccgtgctgttcctgtcacagccctgaccatttctggctgttggtccctgtctgatgccgtatctgtgagccctttgagggcagggcccagggctgtctcagtcgttaccatgtcttcagccctgcctatcccggggccttggctggtactcagtgaatgtcgaatgaatgagtgaccagtgtgctcccctccctcagtgttacctgtttcacatgtacgtgggtgtccgggctggcggaggcattggggacgagatcgaggaccccgcgggtgacgaatacgagctctacagggtggtcttcgacatcaccttcttcttcttcgtcatcgtcatcctgttggccatcatccagggtcagtgctgggagtgggcgctcagggcccggaggcaggctagctccatggctaagaatgcaggcccaggatccagtcggcctgcattcataccccatctctacctctcgctactgtgagaccttgggcaagtcacctctcggggcctccgtttctccatctgcaaaacgagggtgtcaatggtactaacctcataggttgtgatcaggattaagtcagttcataggcgctcggtgtctggctcatatgagtgctcaataaaggcctgagatatatatatatatatatgtttatttatatatatatgtgtttatatatatttatatatgtgtttatatatatttatatatatgtgtgtgtgtctatatatatatatgtataattttttttttgagagggagtctcgctctgttgcccgggccagagttcagtggtgcaatcttggctcactgcaacctctacctcccaggttcaagcgattcttctgcctcagcctcctgattagctgggactacaggcacatgctaccacacccagctaattttttttatttttttattgttagtagtgagggggtttcaccatgttggccaggctgctcttgaactcctcacctcagatgatccgcccacctcagcctcccaaagtactgggattacaggcgtgagccaccgcacccggccaataaaggcctaatactatcttcttaggaagcgagattaggggtgagattagggaaatgggggatggagggcaagccctggaggtaggtagctggagaggggggagtctgaaccaggtcagaggtcgggcactgacttgtgtcctgccaccccaggtctgatcatcgacgcttttggtgagctccgagaccaacaagagcaagtgaaggaggatatggaggtaggtcatgtctgggggtgacccagagggattacgggattcagggggtcaagtgggcctccactctgatgtctcttgccactcacagaccaagtgcttcatctgtggaatcggcagtgactactttgatacgacaccgcatggcttcgagactcacacgctggaggagcacaacctggccaattacatgtgagcagacacactggccagtcaggagggtggggggcatggctgccaatagccagcagtggggtacttagctttggccagttaggaaagggggtgtagtgtccatgtgggcagattccctgccagccaatcagaaggtaagggtggggccccgcaagatggttcacacctgtaagcccagcactttgggaggccaagtggggaggattacttgaggccaggagttcgagaccagcttgggcaacatagcaagacttcctctctactataaatgaaaaataaaataaggtaagggtggttctgacttgtctcctgtggtcctctcaccctcaggtttttcctgatgtatttgataaacaaggatgagacagaacacacgggtcaggtaagggggtgttaatgggaggacagtgggcaggacgtggagccctttaacataaggccagtcagtaggtggcagtaaaaagctcctatcaatatcaagggttagggctgggggctgggcacggcggctcacgcctgtaatcccaacactttgggaggccaaggcgggtggattacttgaggtcaggagttcaagaccagcctggccagcatggtgaaattcagtctctactaaaaatgcaaagattagcagggcgtggttgtgcatgcctgtaatcccagctacttggaaagctgaggtgggagaatcgcttgaacccaggaggcagaagttgcagtgagccaagatcatgccactgtactccagcctaggtgacagagcgatactccatctcaaaaaaaatgggtttgggctgggcgtcctggctcacgcctgcaatcctagcacttcgggaggccacagcgggagaattgcttgagaccagaagttcaagacagcctaggaacacagcgagaccctttctctattaaaaaattagccaggggtggtggtgtgcacctgtagtcccagctactctggagactgaggtggagaatcgcttgagccaggaggctgtagtgagctgtgattgtcgccactgcactccagcctgggcaacagagcaacaccctgtctaaaaatatatatatatatatgtctcaagggtttgaagatgtgaccaatgaactctttctatccccaatcctaggagtcttatgtctggaagatgtaccaagagagatgttgggatttcttcccagctggtgattgtttccgtaagcagtatgaggaccagcttagctgacacacccccagctggccctccacccccacctcaagtgccttattctcacagcaagccccttagtccccaagcccctccccctaaggcagctgggggagaggtgacctagtactggaaaataaatctgtgctacgccccccagcatcactgtgttggcctgctgaaattttggaggagtggacatccaggaattgtttcccccaagaaaaacaagatgacagcagaggctaaagtcatgtttattgggagatgaggacatgccatgaccactagtgtgtctatgggggagggggtgcaaggactagttcctgacacccccctagggactcattcctggatgtagaggttgctgggagcagtaggatcatccactgggcgtgtctccaccactacaggcctgtggaaggaagagataagtcagttcatttattcattcatatgttcattgattcattaattcacaaagtagttaatagagactgtgccagccccatgctgaactatagcagtgaatgggcagacacggtccctgcccttaggaagcttgcattctagagaaggagatcaacatgaatcagtgaattacatgagtgcaaaaaagcatggcatgtctggcagggaaacctaacccaggaggtcagcccagactccccagagaatggatggtgcagcctgaaggggggttaggagggaacttggtgaaagggcaaggaagagtgttctggctggggagaacagcctgtgcaaaggatttgaggtgggagaaaggctgggacttggctggagatgtcatggccttgtgggctgtggccaggattgagtctttatcttgaggccatgggaggattttaagcagggagacagtgacacgatcagatttggatttaaagtgacccttctggcatgtcaaaaggacacaggggctacttaaagtggttcccactggctaaatttaagaccatttgtgcctcaaaataaataatgacaaggccgggcatggtggctcatgcttgtaatcccagcactttgggaggccaaggggggcagatcacttgaggtcaggagttcaagaccagcctggccaatatggtgaatcccatctctactaaaactacaaaaattatccaggtccatcctggctaacacggtgaaaccccatctctactaaaaatacaaaaaaaaattagccaggtgtggtggcaggcactatagtcccagctactcgggaggctgaggcaggagaatggcgtgaacctgggagccagagcttgcagtgagccgagatagcgccagtgcactccagcctgggcgacagagcgagcctctgtctcaaaaaaaaaaaaaaaaatttatccaggcatggtggtgcacgcctgtaatcccagctattcgggaggctgaggcaggaggatcgattgaacctgggaggcagaggttgcagtgagctgagatcacaccactgcactccagcctgggtgacagagcgagactccatctcataaataaataaataaataatgacagtaatagactataacccacagaataaaaatccatgagaccatgctggtataaagaaagaagaatggagaagacacagctcttctttagagtagaatgccaactaacacacgcagaaggaaacatagaatcagaaaatcaccatttattgttagtagccacctaacaataatagattcagggaaaaatcaattgattctaaaactagtgggcaggccaggtgcgttggctcaaacctgtaatcccagctactcgggaggctgaggcaggagaattgcttgaacctgggaggaggaggttgcagtgaggcgagatcgtgccactgcactccagcctgggggacagagtgagactctgactcaaaacaacaacaaaagacaaacaaaaaacaataaaactagtgggtgaaaatctgatgagaaacaacgtatttacagactatttacctcgtctcagtgaatctccccaaaagatacttctttttttttttttgagacagagttcactcttgttgcccaggctggagtgcaatggcgcgatctcggctcactgcaacctccgcctcccgggttcaagcgcttctcctgcctcagcctcccgagtagctgggattacaggcatgcaacaccatgcccggctaattttgtatttttagtagagacagggtttctccacattggtcaggctggtctcaaactcccgacctcaggtgatccacctgcctcggcctcccaaagtgctgggattacaggcgtgagccaccgcgcccgaccggtgggatacttcttattacaaagaaaaacagaggctgggtgcggtgacccctgcctataagcccagcactttgggaagcctacacaggtgaatctcttgagtccaggagttccagaccaggctaagtaacatggcgaaaccctgtctgtacaaaaaatacgaaaataagccaggtgtagtggtacgcgcctgtcatcccagctacccgggaggttgaggtgggaggactgattgaacccaggaggtcgaggctgcagtgagccatgatcgcgtcactgcactccagccagggtgacagagagagaatctatctttaaaaaaaaagaaaaagggagaaaaaagcaacttcacagtggagagaactggctgattctaccttaaccaaatgaccgaagttaatatcaccagtaatgggacaaactagcattgtgtacttcctgaaatgatgcactgagaaagacatctttctgcagtattcctgcccaaaattcagaacgtggaaacctcaaacacagttaagggacattttagaaaacaaatttcctttaatttttaaaaaggtcaaagctcctttaagacaaaagaagttttaattattttttccggcttaattataaagaaacatggctcctaagtgccacctatgatcttggaccagaaaaaaaaaaaaaaaaaaaaaatatatatatatatatatatatatatatatatatatatatataatcacgggcgtcactaggacaacgggtgaaattttttgttgttgttgttgttgttttctgagacagagtctcgctctgtcacccaggctggagtgcagtggcgtaatctcggctcactgcaacctccacctctccgattcaagtgattctcctgcctcagcctcccagctgggattacaggcacgtgccaccacacccagctaatttttgtatttttactagaggtggggtttctccatgttggccaggcccatctccaactcctgacctcaggtaatctgcccacttcagcctcccaaagtgctgggatgacaggcgtgagccaccacacctggccaactggtgaaattgagtaggggtatgaattagaaggttgtgatgtttcagtgttgttttcttgattttgacagctgtgctgtggtttgtaacattatgtccttgctttgattcaggaaacatacactgaagtattttaggggtaaatgggcatcacgtctgcaattcattcccaaatattcattaaaaaatcacacacacacacacacacacacacacacacacacatatacttgtatgtgtggtgtgtgcgcataagaaagagaagaggccgggcatggtggcacatgcctgtaatcccagctactcgggaggctgaggcaggaggagtgcttgaacccaggagtgggaggttgtggtgagctgagattatgccattgcactccagcctgggcaacaagagcgaaactctgtctcaagaaaagaaaaaaaaaagaataataaggcaaatgcggttaaaaagattaacatctggccaggtacagtggctcacgcctgtaatcccagcactttgggaggcagaggtgggtggatcacctgaggtcaagagttcgagaccagcctaaccaccatgatgaaagcccacatctactaaaaaaacaaaaaaattagctgggcgtggtggtgtgcaactgtagtcccagctactcaggaggttgagacaggagacttgcctgaacccgggaggcagaggttgcagtgagtggagatccactgcactccagcctgggccacacagcaagactccatctcaaaaaaaaaaaaaaaaaaagatctggttaatctggataaaagggatttttgcaacttctctgggagtgtgagttttaaattatgtcaaaatagttaaaatagttatttttaatagttaaaaatttttaataagataaaaatctaaaataaaaatgcagccagggctgggcacggtggctcatgcctgtagtcccagcactttgggaggccgaggcgggcagatcacctgagatcaggggttcaagagcagcctggacaacatggcgaaagcctgtctctactaaaaatacaaaaattagccgggcacagtggcacatgcctgtaatcccagttactcgggaggctgaggcaggagaatcgcgtgaacccagtgggtggaggttgtggtgagctgaaatcacgccaccgcattccaggctgggcaacagagcaagaatccgtctcaaaaaaaaaaaaaaaatgcagccaggtgtggtggctcatgccagtaatcctaacattttgggaggccaaggtaggaagattgcttgaggccagcagttcaaggacagccagggcaacatggcaagaccccgtctctacaaaaaaattttaaaaattagccagttgtggtggtgtatgcctgtggacctagctacttgggaggctgaggtgggaggatcagttgagctcagaaggtcaagactgcagtgagctgtgtgtgtaacactgcacttcagcctgcgcaacagaatgagaccttgtctcaaaaatgaaataaaattaaggccaggtgcagtggctcactcctgtaatcccagaactttgggaggccaaggcagctggatcacctgaggtcagtagtttgagaccagcctggctaacaaggcgaaaccccgtctctactaaaaatacaaaaaatagccaaatgtggtggtacacacctgtaaacccagctacttgggaggctgaagcatgagaatcacttgaacctgggaggcagaggttgcagtgagctgagattgtgccactgcactccagcctgggcaacacagcgagactctgtgtcaaaaataaattttaaaaaaattttataaataaaagaattaaaattaaaaaataaaaggattggccaggtgcagtggctcatgcctataatcccagcactttgggaggccgaggcaggtggatcaccgaggtcaggagttcgagaccagcctggccaacatggtgaaatgccatctctactaaaaaatatagtattagccgggtgtggtggcacatgcctgtaatcccagctacttgggaggctgaggcaagagaatcgcttgaacctgggaggcagaggttgcagtgaaccaagatcacaccattgcactccagcctgggcaacaaaagcaaaactccatctcaataaataaataaataaataaataaataaaagaattgctgggcatggtggcacatgccggtagttccagatactcaggaagctgaggtgggtggatcacttgagcctgggaggtcaaggctgcagtgagccgtggtcgtgccattgcactccagcctttgagtacagtgagaaacaaaacaaaaagagagaacgcccccgtggctgcagtgcagagaacagactctagggagcagggatggaagcagggtgaccaggtgagacactgtccaggctagagataccttgctggggacacctcagaatgctctcttcacatcagaagccccctcccaggtccttctgcaccccaccccacaacatacctgggggagccaagcagacggaaagtgagggtagggtctctcagctcctgtagcagctagggaaaaaaagtgtgtgtctcagtgcctggaagatacctccactgtcactacgaacatggctcccttaaagacagcaaggagctgggcacggtggctcacgcctgtaatcccagcactttgggaggccgaagtgggtggatcacctgaggtcaggagttcgagaccagcctggccaacatggcaaaacctcgtctctactaaaaatacaaaaattagctaggcatggtggtgcgcgcctatagtcccagctactcaggatctgaggcagaagaatcacttgaacccgggaggcagaaattgcattgagctgagattgcgccactgggcgtgccactggagccgagatctccagctgagataatttttgtatttctactgaaaatacaaaaattagccagctgtggtggcgcatgcctgtagtcccagctacttgtgagggtgaggcacgagaatcgcttgaacctgggtggcagaggttgcaatgagccaagattgtgccactaacactccagtctggggaacagagcgagactccatttcaaaaagagggaaggaactgagtgagcaaaaataaataaataaaaatactaaagtgtaagggcaaagtctgacacagtattctgtgagataaacaccattttccaaatgaggacagtgaggcacaggaaggttaagtcatttgcccaaggccactcagctgaattccaacccagacagtcttgtcttaactatccatatatctctatagtggtccccattttacagttggggaacagaagcttaaagagaagcaacgttgccagcccaaggtcacagtagtggcccaggatgagattgggactcaagaaatccaagagcagccaggtgcagtggctcacacctgtaatccaagccacttgagaggctgaggagggaggattgcttgagcccagaaagtcaaggctacagctagctatggttgcaccactgcacttcagcctggacaagagagagagaccctatctccaaaacaaacaggccgggtgaagtagctcacgcctgtactcccagcactttcggaggctgaggcgggcagatcacttgaggtcaggagttcgagaccagtctggccaacatgacaaaaccccgtctctactaaaaatacaaaaattacctgggcatgatggagtgtacctgtaatcccagctactcgggaggctgaggcaggagaatcacttggacccaggaggcagaggttgcagtgagctcggatcatgccactgcactctgccctgggtgacagagcgagactctgtctcaaaaaatatataaaaatggccaggagtggtggctcacacctgtaatcctagcactttgtgaggccaaggaaggcagattggctgagctcaggagtttgagactagcctgggcaacatggtgaaaccctgtctctactaaaaatacaaaaaaattagctaagcatggcggcatgcacctgtagtctcagctactcaggaggctgaggcaggagaattctttgaacctgggaggcagaggctgcagtgagccgagatcgcgccactacactccagcctgggtgacagagcaagaatccatctccaaaaataaataaattttatctatctatctatctatctatctatctatctatctataaaataggccgggtgtggtggctgacagctgtaatcccagcactttgggaggccaaggcgggtgaatcaccccaggtcaagagttcaagaccatccagcctgatgaacatggtgaaaccccgtctctactgaaaatacaaaaattagccagctgtggtggcgcatgcctgtaatcccagctacttgggaggccgaggcaggagaatcgcgtgaacccgggaggtggaggttgcagtgagccgggatcgcaccactgcactccagcctgggcaacaagagtgaaactccgtcttaaataaataaataaataaaaataaaataaaaaataaatcctggggcaaagaaggggatctatctgaactgaaatttggaagatgtttcccctccaggacttcacactctgactcaggagttctcggagcccatctgatgaatgtcatgatggaggctggggggcagtgatgtggagtttggatggaggggcttacctgatccgagcctagagcccacacctgcactccatgcttccagaaggcctgaagctgacctccaaccatagctggggagaaagcaatgcccgttacccttggggatcacttgagtttccacccctgatcctgggctctcccgtccctgcacagacccacggcctccaccgcttcggtcatggggatctcaggtgtgcgaagtccccggactggggacccctccggggtcaccagcttcacagagcctggaaggagatagacggttttaagaactgtgagcaaggcttagagggttactaagggaccaatccataaattcagtgtgaaagctatgtaggacaggggcaaggcccagaggggctcagggggttctgagaagcacaagttcggaggcagagatctagggactgcagctggaggggtggggaggaaggggaggaaggagggttctcaccatccatcaacaccatcaccatatcttcctctacctgggtcacctgcacgggtcccctgtgctctgtttggggggagtgggttaaggattgaccccaccccattcccctttccccacaccacccccagaaggccagtacctgtgctttagccaccgcctcagttcacaagcaagtgggctaaaccccgcccaccatcccggtcccaccccatcatcaatctccccagttaactaaaacctgccattctcccttctccgcccttccagccctttctcagtcccgtagtgcctcaggctaagcgaagccccgcctccagctccgcccctccggatctgataagccccgccctcagcaagactccgccccactcaccggtgctcatctcgcccagccagcaagagagcgcgccaaagcgcaccgtgtggaagagcaccgacttccccggccgcccggggctcacgccgatgcacacagcgggcagctcagagcctggcccggtcagcagcgcgaacacggacagaggcgtcggcagtgggaacagcacctgctgcgggccgcacagggaggggcgggctagggggtggttcaggacggggcctcagggggcgtggcttgtagctggcctgggacttccgaaccagggccctaagtcttgggggatgccgtctagaaatgtcaggggataaggcctggtgcctccgcgggaacgggggtcgtgacctccgagtgggtgtggcttccatgtgggggcatgccaccttggcggcagacgggcagggccccaaagatagcaaaacctgcttagacactcaaagagacaggctctaaatgggctctactaggacacccagggagtggcagcattgagcctgaggaataattaggcccaggtgtgaggggcggcgcttaaggatcaggatggcttcagaaggacgaggctccaagcgcagaccgcaggtgggcggggcctcgggagattggggcggggcctcgacggaggtggggcttcatggagctcttgatagaagcgcaaagggtgcaaggccttagccacccactcctcagagttcccagcaccctcccaagccccttacccggacaagcaggaatttgttcatgggctggtaccactgaagcaggacaacggacgtctccaatgcaccgcacaggaacgggcccccagagctcgcaccctccgctgtggcatgggcaaggatgagtcaagatcaatgccctctatcctcctcgccacccacactaccacccatcttctgggttctggacacattgccttaactctgtaaccttctcaggtggatgcagttcaagcccctcctctggcctggccccgcccactctctgcacacccgtgaagctctctctcacccacacagcacgcccggcagcctttggtgtcctggatcttggtggaaaccatgttcttcctggagaataggtaggtgtgaaggggggtaggacagcaggaggcagaggggcatgggaggaattataaggctgtgtggtgccattcattgggagctggtaccttgccagtaggcggtgggggctaatgtgagcgatggggtttcctgctctggtctctttccgttccagcaggccaaggatgctatgagaatacaggtggggggtctttcctgcagggtgtgtgtatgtagggggaagcaggaagttataggatcccatataccacttcctttcctccatcccttccctcagccccatccctttgtctgaaactcccaagcctgcaagtctcaagtacttgtcattcattcattcatttctcactccacatagattgaacgtccattgtaggccaggcctgctgtgcttggctctggtgaacagtgatgagcataaaaaatatgttccctaccctcgtggtatttgtagccgtatcagaaactctggacacataaccagtcagatgaagttacacatcttacaaagttttagaagaaacacatctagaaaatcttctagtttgtcatcacagatgtggctttcactaactcatgaatcccatttggcttggtgtttcccccaaaactagaaattatttcatttatttattattattattattattttagacagtctcgctctgtcacccaggctggagtgcagtggtataatcttggctcactgcagcctctgcctcccaggttcaagcaattctcatgcctcagcctcccaagtagctgggagtagaggtatgcgccaccatgcctggataatttttgtatttttagtagagacggggttttaccatgttggccagtctggtctcgaactactgacctcaggtgatctacccgcctcggcctcccaaagtgttgggattacaggtgtgaaccaccgcacccggcctatttattgttatatatagacagggtctcattctgtcttccaggctggagtgcagtggtgtgatcatgactcactgcagcctctaacttctgggctcaagtgatcctcccacctcagcctcccgagtagctggaaccataggtgtgtgccaccacacccagctaatttttttttaatttttagtagagacgaggtctcactatgttgcccaggctgatctagaactcctgggctcaagcagtactactgccttggcctctcaaagtgctgggatcacaggcatgagccactgcaccccgtccagattttgaaatctataacttgctcactctatcttagtaaagtatggaataagttctgattgtcatctgaacatgaaagctatttaaagactaacttagggctgggcacggtggcttacacctgtaatcccagcactttggggggctgagacgagtggatcaccaggtcaggagttcgagaccagcctggccaacatggcgaaaccccgtctctactaaaaacacaaaaaattagccgcgtgtggtggcaggtgcctgtaatcccagctacttgggagggtgaggcaggagaatcgcttgaacctgggaaacggaggttgcagtgagccgagactgcgccactgcactccagtctgggcaacagagtgagagtctatctcaaaaaaaaaaaaaaaaaaaaaaaggactaatttaggccaggtgcggtggcccacacctgtaatcccagcactttgggaggccaaggcgggtggatcacctgaggtcaggagtttgcgaccagcctggccaacatggtaaaaccccatctctactaaaaataaaaaataaaaaaagtaaaaaaaaaaaaagccagtcatgatggctcacatctgtaataccagctactcgggaggctgaggcacgagaattgcttgaacccaggaagtagaggttgcagttagccaagatcacgcccctgcactccagcctgggcaactgagtgagactcggtctcaaaaaaaaaaaaaaaaaaaaaggctaatctaaggccaggtgtggtggctcatgcctgtaatcccagcattttgggaggccaaggcagttggatcacctgaggtcaggagtttgagaccagcctggccaacagggtaaaactctgtctctactaaaaatacaaaatttagccaggtgtggtggtgcacacctgtaattccagctactcaggaggctgaggcatgagaatcacttgaacctgggaggcagaggttgccgtgagctgagattgtaccactgcgctccagcctgagtgacagagggagactctgtctcaaaaaaagaaaaaaaaagactaatttattgtagaaactacctcaaaattgacttgagaggtgaggactattgtgaaccccattttacaaatggagaaattgaggcttggggagcacagtcaaaaagtgtctgggatttgaacctaggactttgtgaccaagcagtctaagttttttttcagctgtgcccgtctacttcccagcccccgaacccttggaccccttaacttccgaccccatcccacctgctacccacagccagacctgagagagacatgagaacgttgttgatggagtacacccacgtagtccggctaggaaagagctgcagggaatgggagagatggctctggtgacaccccagcaacccccgactccggcccttgcccttgccctggcccggtatggttcctcaccatttccagcgtggcctcctggtcattccggttcaggatgaagatgccttcctctgcccccaggagcaggtgctggtctggaggcacagacaaggacgctgggaccgacttcatcctcagggacctcccagatccccacctgtctgacctcaaacactgacactctgtccccagctctgaccctctattctttctccaaaccaatactcccagcctctgtttccccaaacaaagccagagcggacggtcccgcaagccagtctcactctccctccttttgactacccatattctggtggttctttcttctctgcccaactgtcttctgaaccaaactgaccccaaccttagacctgtcccccaaaatagtcctctgatttcctcccctctttctccccagttctgataccctaatgccaatcctaacattgaccttcaaactcagacacccccaaacaggactttttctgtccagtgtgacctgttcctttaacactgaccttgtcttcatctctttgatctctagattctgtccctttctggctgcatcctaatctctaaaattcctcaccccaaaatgctgctcccagtctccctatcattaacctccagctgtccatctttctcgtgctccaaactctaacctttttgttatattctgacactcctggcccctgaattccaatattcctactttcactctccaactcatccctctacccattttttttttttttttttttttttgagactgagtcttgctctgttgcccaggctggagtgcagtggcatgatctcagctcactgcaacttccgccccctggattcaagcaattatcctgcctcagcctcctgagtagctgggattataggcacgtgctaccacgcctggctaatttttgtgtttttagtagagacgaggttttaccacgttggccaggctggtctcaaactcctgacctcaaatgatccgcccgcctccgcctcccaaagtgctgggattacaggcgtgagccaccatgcccggcctacctagcttcttttgtatttttagtagagacggggtttcaccatgttggccaggctggtcttgaactcctgacctcaaatgattcacccgcctcagcctcccaaagtgctgggattacaggtgtgagccaccacacctggctgccctctatgcatctttgatcaccaaatcctgagtgtaaggacaagctccgcccctgtttcagcctggccacaccccaactccattaagctcctccccgtccctgcctttgtgccttccttaggcttctccccacccctacttttgctctcccattccctacaggatctccttgaccctccagaatgcccacccttggtggagggatgtgtccaggcggccgtgctgtggatccggagggggcagccattgaacaactttacgagaagggcacatccctgggcaggtcgccgcggggccaggcagcagatccggcaaagagagcagggaacaggaaggggcagtggttacgactttggagcgagagtgccaaggttcaaatcctgcctcttaccttggtgcaatttcccataatctatccctgtaatacactttttcatacattgagttttcttttcagtttgtttttgtttttttttgttgttgttatatatttctttttttagtttttcctccactatcctaaatcatcagcatttgttttttttaagacagagtctcactcggttgcccaggctggaatgcaatgacatgatctcagctcactacaacctctgcttcccaagttcaactgattctcatgcctaagccttctgagtagctgggaccaaaggcgtgtgccaccacacccagctaatttttgtatttttagtagagatggagttttgccatgttgcccaggctggtcttgaactcttggcctcatgtgattcacctgcctcagcctcccaaagtgctgagattacaggcgtgaggcaccactcccagctgtcagttttgtttttggagatggagtctcactctgttgcccaggctggagtgcagtgatgcaatctcagctcactgcaacctccacctcctgggctcaagcaattcttctgcctcagcctcctgaatagctgggattactggcacacaacaccacgcctggctaatttttgtattttagtagagacagggtttcgccatgttggccaggctggtctcgaactcctgacctcaggtgatgcgtctgccttggtctcccaaagtgctgggattacaggcatgagccactgtgcctggccagcatatatatatatacacatatacatatatatatagacacacacacacacacacacatatatatacacacacacatacatatatacacacatatacatatatacacacatatacatatatacatatatacacgtgtacatatatacgcatatacatatatacacatatacatatatatacacacatatacatatatacatatatatacacatgtacatatatacgcatatacatatatatacacatatacatatatatacacacctatacatatatacatatatacacatgtacatatatacgcatatacatatatacacacatatacatgtatacatatatacacacatatacatgtatacatatatacacatgtacatatatacgcatatacatatatacacatatacatatatacacacatacatatatacatatatacacatgtacatatatacgcatatacatatatacacatatacatatatacacatgtacatatatacttatatacacatgtacatatatacacacatgtacacatatacgcatatacatatatacacatacatatatacacacatatacacatgcacatatatacgcatatacatatatacatatacatatatacacacatatacatgtatacatatatacacatgtacatatatacgcatatacatatacacatatacatatatacacatgtacatatatacacatgtacatatatacacatgtacatatatacgcatatacatatatacacacatatacatgtatacatatatacacatgtacatatatacgcatatacatatatacacatacatatatacacatatacatatacacatatatatacacatgtacatatatacgcatatacatatatacacatacatatacacacacacatacatgtatacatatatacacatgtacatatatacgcatatacatatatacacatatacatatatacacacatatacatatatacacatgtacatatatatgcatatacatatatatacacgtatacatatatacacacatatacatgtatatgtgtgtgtatatatgtatatgtatatatgtatgattaattatgctatgcatttcatctttgaatcatttccagtgctggaggtataaattatacatacttttagccggtagccaaccaggcacggctgtaatcccaccagtttgggaggccgaggtgggaggatcacttaagcccaggagttcaggaccagcttgggcaacatagtgagaccctgcctctataaaacatttttttaaaaattagccaagctgggccgggcgcggtggctcacgcctgtaatgccagcactttgggaggccgaggctggcagataacttgaggtcaggagtttgagaccagcctggccaacatggcaaaactccgtctctactaaaaatacaaaaattagctgggcgtggtggtgggcgcctgtagtcatggctacttaggaggctgaggcaggaggatcacttagactggggaggcagaggttgcagtgagccaagatagcaccactgcactccagcctgggcgacagagtgagactccatctcagaaaaaaaaaaaaaaaattagccaagcgctactagggagggtgaggtgcatggattgcttgagtctccgaggtcaaggctgcagtgagccatgatcgcgccactgcactccagcagcctgggcgacagagcgagatactatctcaaaaaaaaaaaaaaaaaaaaaaaaagactttagagagttctaattcattttatgcatttgttggcaaatttgatgccacaaaggtgcattatcacaacactgactacgtgtgtaggcattatgcatgtacgtaaaaacactgaaacttcctgaataaagagatgttctttttgtacatctccatttatgagaggtaaaatttcttgagatcttggctctttgggcaactgcatatgtggtagtgactcatggaggttttgatggatcttgtcaaaagactctaacttctggactcaagcaatcctcccacctcagcttcccaagtagctgggaccataggtgtgtgccaccacgcccagctaattttttaaatttttagtagctgggcgcggtggctcatgactgtaatcccagcactttgggaggccgaggcgggcagatcacaaggtcaggagatcgagaccatcctggctaacacggtgaaaccccgtctctactaaaaatacaaaaaattagccgggcctggtggcgggcacctgtagtcccagctactcgggaggctgaggcaggagaatggtgtgaacctgggaggcggagcttgcagtgagccgagatcgcgccactgcactccagcctgggtgacacagtgagactctgtctcaaaaaaaaaaaagcatgccagacgcggtggctcatgcctgtaatcccagcactttgggaggccgaggcaggtggatcacctgaggtcaggagttcaagacgagcctaaccaacatggtgaaaccccacctctactaaaaatacaaaattagccgggcatggtgctgcattgcctgtaatctcagctactccggaggctgaggcaggagaatcacttgaactagggaggcggaggttgtagtgagctaagatcgcgccactgtactctagcctgggcaacaagcaaaactccgtctttaaaaaaaaaaaaaaaaaagcagaaacaacaatcctgcctcagcctgcctcctcaaaggtatttatatgaccttgggtaagccacttaccctctctgtgcttcaatttccccatttgtgaaatgggggataacatctctgtgatatcttcttcactctgtgaagctttatgccatgtaatgataggagataagtgtagggcacagagaagcgctcaacaaatgtcacctgttgttactgtcagtcctgccaccccctccccaccccaccaggcatccccagccccgtccagaggtgtaagtcctcagcagagctgaacctcacctttctcttcatcttttccttcttggggggcagaagtgggggcttgtcaagctcccgggagggtgggttccagagtgagggttctgagaggggttaggagaaaatcagcccccaagaacccccaaccctcccgccctccaccctagcctgtcccattacctgaatgggcggtgaggtgggggctgctggtggatgggggaggcccaggacgggggctgtttggtgggggcccactggcacaccggaccagcacccccgggctcagctgcccatcatcccccatgctcccaggaccctcgtctgatggagaacggaacttgggctttggagacgggaatggagcgtggggaaatacatcagatgatctcagagagggcacccttttgcaactcaagtccctgcctccaccagaactaacagctgtggctctgacccacccccccgacaacatcttgtgccccctccagccttcccctgacatccccagcctggacatcaacacacttcagaaactaatgggttaatgctggatatatagcaggggcttcctaggaccagctactgaccagtgtctaagaggctaaatattttgaatccgaccctgaggttgagggatgccacttccagatcccaatgtagccatcatcctggtctccccaattccctgccctggagagcccagtatcccagcatctaaggacctggcctcctggcccccagtggccctgaggccccagcctcccagctctggcccagggccttaccttggggggaagtggaggaggtgtgtcctctgcaggggtggggctgaaacacaaagatgggttaaatagctggggggctggggaacaaggactcggggaagatggcatggttctgggctggaggcccgggactggggtctgaggtgaggaggattaagggatgactggttctgcctggagcagaggattaaaggattaatagccaggctggacatagtggctcatgcctgtaatcgcagtgctttgggaggccagggcaggatggcttgagcccaggaattcgagactagcctgggcagcatagcaagaccttgtctccagaaaaaaattaaaaattagccaggcgtggcaggtgcgcctgtgaccgcagctactcaggaggctgaggtgggaggattgcttgagcctgggaggttgaggctgcagtaagccatcattgcactcctgcacttagccttggtgccaaaacaaatcatgagtttgagaccagcctggacaacatggcaagaccccatcctacaaaaaaatgattagcctgtttccaaaaaaaagactaataacagtaacagcaactcttggaggtggagtgctgacagtgcaccacggctttgcacctttacaccacctagtaacacaggtgacatcagcgccgtggccctgctctccctgtgctggcgccacacacaggctgtcgcacgtgatgggtgaagtgagtgcgcgcacctggatggagcctgactcggcctgtgggctggggagtatgggggcctgggctgactgttgggtctggatctggggctcagtatctggtctttgggagatttccaggtgccaaggttcagcctgagggcgggcaaaaagataggaaaagctgagggctggggctgaaggctggagggtgggtctggggtgagagtgacattcgggaggagtttgagactgggatgtggctgagggtgcagggtcatggaggataggtggggtcaagtcagagattggagcagcagcacattctagaaggaactggggtcagctctggggtggagagcaggtggggggctgacgctgagggtcaagtcaaaagattgtataagaagatggaaggaggccaagtgcagtggctcacacctgtaatcgcagcactttgggaggctgagatgggcggatcatgaggtcaggagtttgaaaccagcctggccaacatggtgaaaccccatctctactaaaaatacaaaaaattagctgggcatggtggcaggtgcctgtaatcccagctactcaggaggctgagacaggagaatcgcttgaacccggggagccgaggttgtagtgagctgagactacgtcactgcactccagcctgggccacagagtgagactccatctcaaaaaaaaaaaaaaaaaaaaagaagaaggtggaaggaaagaaggaaagtgggagctggagctgggatcaggttgggggtcaggggttggaggtgaagggttaagggaggtggggttagggaacagggcctaggtagctgggcagaggggctgcattgagggtctaatcagggctcagggctcggggctagaagaaaggcaggggtgcagcggggtcaggagtggaggaaaggccacatcaggggattgtaggaaggtgggggctgaggtggggcctgtggagctgcaggcagggcctcacttacatgtccacgtcgtcatagtcatcgtcagacgactctgacagttgcttcctgaagggtgacaggtatgagccttgggggccttgtccacattccagccccctccccatcctccctggggtccctgacctggggctgctgctcctgaggtctcgaggaggctgtaggcgagcctgtggggtaggaaaagggtcagcagtggcctcagggaagcaggcggtgtggtggggagtggggggacagcatctcacggtgttggctgggggtctggtctccattcctcggagcttcctgaactccatgtgccgccctagggtgggtgggggaagataacctgctgtgagctgggggcaaggggtaacgagatgggtttaagaacagaaagagtagaattggcgggggggttgcagtcaggatcttggggactgcaaatgatctcagggaactgtcccttggggaaaggggtcttggattacagggacttcatttgggggtcaagtttgggatcaagaccaggtgcagtggctcacgcctataatcccagtactttggaaggctgaggtgggcagatcgctggaacccagagtttgagacctgcctggacaactgggcaagaacccatccctacaaaaaatgattaaaaattagccaagtgactgggcacagtggctcacgcctgtaatcccagcactttgggaggtgaggcaggcagatcacctgaggtcaggagttcatgatcagcctggtcaacatggtgaagccccgtctctactaaaaaaaaatacaaaaattagccgggcatggtagtatgcgcctgtaatcccaattactctggaggctgaggcaggagaatcgcttgaacccaggaggcagaggttttggtgagccaagatcgcaccatcgcactccagcctgggcgacagagtgaaactccgtctcaaaaaaaaaaaaaaaaaaaaaaaaaaaaaacattagccacgcgtggtgaataagcctgtagtcccagctactcaggaggctgaggtgggaggattccttgagcccaagaagtttgaggcttaagtgagctgtgatcacaccactgcactccagcctgggtgacacagcaagatcctgtcacaaaaaaataaacaaataaataagttttgggatcaggaagttgggggctcaatgtagttacagggtgttttcaggatccgtttgggtattgaggttctgatgagatttctgaggtctccctgggaactctatggtcattttgcttttgtttttgttttgttttgttttgtccttgagacggtctcgctcttgtcacctggactggagtgcagtggcgcaatcttggttcactgcaacctccacctcccaggttcaggcaatcctcctacctcagcctcccaagtagcttggactacaggcgtgcactaccacacccggctaatttttgtatttttagcagagacagggtttcaccatgttacccaggctcgtcttgacatcctgacctcagatgatctgcccaccttggcctcccaaagtgctgggattacaggcatgagtcaccacgcctggcctctacggtcattttgtagttcaggtgctgatgagattgtctggggtctcttataggatcagatgatgctgagggtctctggaggcctgatggtaggggaaggtggtctcttaggtctattatagggtcaggtgtccccaaacataaggattctctactcacgacagcagtctgcatctgggatccccagagagctggagcggtgggtggatctgatccgccgagggatagcagggggtagctgggcagaggggcagccacgtcagggctcaagacccccaagcagcctcctaccctgcccggggtccatctgctctctcctgtaaccctctgggcacacagccttttaccaagctccccatcctccctccctgttttccccctaagagaggcagcaggaaggcactgctggcagcaggcacagcctgagaaagaccgagaggtccccagtgctcttgtcagccaaggctctcacctcgggctcctcatcctcaatgtccccaatggagggtcctttcccgggattcttcagtttgtcaagaagatccaggatcaggcctcgattcagcccaggctgggataccagttgatgctggcggagggaagaggtgtccgtatccagagggatggtgtggacagagagggctggtgtggacagagaggactggtacagggccttggggactggactaaaggaatctagctggggagaaggtgccagtgaaggcagagggcggggaaatccagggaactcagaggcctggggtattcttttttgtttgtttgttttaagacagagtctcactctgtcacccaggctggagtgcagtggcacaatccaggctcactgcaacctccacctcctgggcttaattgattctcgtgcctcagcctcccgagtggctgtgattacaggctcgtgccaccacgcccagctaatttttttttttttttttttttttttttttttgagacagggtctcgccctgtcactcagactggagtgcagtggcacgatcctggctcactatagcctccgcctcctgggtttaagcaattctccaacctcagcctcccaagtagctgggattacaggcgtgcgccactatgctcagctaatttttgtatttttagtagagacggggtttcaccatgttggccaggctggtctcaaactcctgacctcaagtgatccatctacctcagcctcccaaagtgctgggattacaggtgtgagccaccatgcccagccgaccggtgggagtctaagacatttttaggaattagaagaatttaggtttctcagagcggggctaggagaattccagagttgtcttggaagagactgtggttccctggggattcaagaggacactcaggacaagtcttgagtcctttgggaatttgtcagttccggcaactcggggtatttgggaaaggtctggggtataacccggagggtctctggtggtcgggggtggtcctgggaaattctgaggcactagggactttggaaaggccacggggactccatggaacaaagttatccatgtcctcgggagttgtggaaggccccagggaatcctaggctgaggatcttggggaagggagggttacactgagcatcttggtggcgctgggtcgtttcttgggactcttagtcagagtgactttgatgaagttgtggaaggcagccgaccttgggaagaagaagccaggttctggatgaggggaccagaaaccctcccatcaggccacccagccccagccctgccctctctcaccctccctcctgttactctctcgtaccatttgcctttttccttcagtcggggaggctggtagccactcttggtcatgaggaagagaactctagaatagtagggaaaggacatggggttcagaccctcaagggggccagacctcatggcttgaggggttcctagtagcattgtggtcagcagagggcaaagtgagaaacagcatggaagtgaggttcaggttttacagtgcaccagggtgcctctcctaagggaagccatttatgaagtgatagagctatggcaaggccaggtgtggtggttcacgcccgtaatcccaacactttgggaggccaaggcgggaggatagcttgagcccaggagttggagaccagctggggcaacatagtgagacaaaaaaaaaattttttttttaaatagctgggtgtggcaatatgggtctgtaggaccagctatgtgagaggctaaggcaggaggatcatttgagccccggcattcaaggctgaagtgaactacgatcgtgccgctgcactccagcctgggtgacagagccagatcctgtctctaaaaataataagaattaattaattaatttaaaaaatgtctgggcgtggtggctcacacctttaatcccagcattttgggaggccaaggcaagtggatcacttgaggtcaggagttcaagaccagcctggtcaacatagtgaaaccccgtctctaccaaaacatacaaaaattagccaggcatggtggcgtgcacctgtaatcccacacttgggaggttgaggtggtagaatcacttgaaccctggaggcagaggttgcagtgagctgagatcttgccactgcactccagcctgggcaacaagagtgggactccatctcaaaaataaataaataaataaaaataaaaataaataaataggctgggtgcagtggttcacgcctgtaatcccagcacctccggaagccaagatgggcagataacctgaggtcaggagttcgagactaccctggccaacatgttgaaaccccgtctctactaaaaatacaaaaattagccgggcgtggtggtgcacacctgcagcctcagctactcgggaggctgaggcaggaaaatagcttgaacccaggagatggaggttgcagtgagccaagattgtgccactgcactccagcctgggcaacagagcaagactctgtcttaaaaaataaaaaataaaataaaataaaatattaaattaaatttaaaaaatagagctgcagcacgtgcaaaggtaggctcaagtggtgatccctgaattggaggttcctgggatggaaggcggaagctgagggtgggctttgggccagggctagacaggatctctgggcctggggaccccacgcctgcctacctgagagggtgcacatcaaagagcggtggctgtagctcggccagttcgatggccgtgatgcccagggaccagatgtcacacagctcattgtatcctcccttcagggccacagctgccacttccggagccatcctgggggcagacacgctcagagagccagaggtggcatggggacaggaagggaaggaggggcagagaaggagaaggagttgaggggagacgcagcacacagagagtcagatggagagacagagggacaggagtaaagacagacacaggcagatgaagacagagatgcagacggggcgcgatggctcacgcctgtaatcccagcactttgggaggctgagcaaggagaatggcttaggcccaggagtttgagaccagcctgggcaacttatcaagaccctatctcggctgggcacggtggcttttgcctgtaattccagcactttgggaggtcaaggcggacagatcacctgaggtgaggagttcgagaccagcctgaccaacatggtgaaagcccgtctctactaaaagtacaaaaattagccgggcgtggtggcaggcgtctgtaatcccagctacttggtggctgaggcaggagaattgcttgaacctgggaggtgaaggttgcagtgagctgagaccatgccactgcactccagcctgggcaacagagcaaaactccgtctcaagaaaaaaaaaaagaacgaaaaagaaaaaaaaaaaaaaacaacaccatctctacacaaattttaaaaattagccaggtgtcatggtgcacacctgtggtcccagctacttgggaggctgaggtgggaggatctcctgagcccaggagttctaggctgcagtgagccgtgactatgccactgcaatccagcctgggccacagagtgagaccctgtctctaaaaacaaaacaaaatgaaaagacagagaggcagagacagagagtgagagagacagaaacaaagagacagagagcactgcaaactgagctagaggaaaaagacagaaatggatatggagggacagagaaatcaagataaaaatcaacacaaacaccgagagcaatggccagaaaagggcacaaagagagaggaaaatggaaaactcaagcgacacccagagagaatgaaagaatcttccaaggagaaaggacgaggcaggggaacggagccaggaaagaggatcccggggaaccagggtaggaaaaaccactgacccccactccacccctagctgcccgctgggcgccactcaccagtagggtgtcccaatgaaagagaggcgtctggccagtgtagccccaatctgggccgagatgccaaagtcagctggaagcagagggagacatagtgatctggggtccactgcgcttccggccccccagtcagcccccctgctcaacccccagccttactcacccaatctgacctccccagcatcattgatgaggatgttagctccctgggaatgagaggggatatgggaggctgcagagactctccccagcccagtgctagcccactccgccagctcaaactaccctgatccctgagcccctgaaatgccactcccatctcctgggccccaccccccaacagcacccctacacccccagaccaccttgatgtccctgtgtatcttcttctgtgagtgcaaataggccagtccctggggagaagggtggacaaggggacagtgagtgtttgggggctggagtggggccaccctcccctcccatccccagaatccccaggcctctccttacctggagcacttcccggcagacatagctaatctggagctctgacagggagcctgtcactgcaaaggtcaccccggccaggccaggcattggatgggagccagggaacctgggctggggagtcctgcccccccacaccagctaagagggtgccatagggagaggggaaataggataggaccagtgggagggggagatggtggggtggtcagtgacagaaagaggcagcaatgcaaataaaagaggccaataggcctggcgcagtggctcatgcctataatcccagcactttgggaggccaaggtgggtggatcacttgaggtcaggagtccgagaccagcctggccaacatggtgaaaccccatctctactaaaaaatacaaaaattagccaggcatagtggtgcatgcctgtaatcccaagtactcaggaggctgaggcaggagaatcgtttgaacccaggaggtggaggttgcaatgagccgagatcgtaccactgcactccagcctgggcaatagaaggaggctctgtctcaaaaaaaaaaaaaaaaaaaaaaaaaaaggaaagaaggaaagaaagaaagtaagcaagataaataagtagaatatgatatagttcctcagacgctgatagacagcaagaagaaacataaagcaagaaaggtgcgcgtaggaggagctatgacatttcacagaggtggtcagtcagggctgctctctgaaggtgacagtgggtgaagacatgagggctcccactctgagtgggaccagccacagcaagtgcagggccccaggtgggatagtccctggtgggtctggaaagcagcaaagggggtggggtggagtggagggggaggaggaaagtgggaggaggtgagattggccagcatggggtggaccctgatgaggagtctgggcttctcctccgagagaaatggaagctgtaggagggctctgagcaggggcgtcatgtgactttgcaaaataaggaaaggcacagagacagagagagacagagaaacggagacagatcatacatgagacatacaaaaggaacaggattgaaaaaaacaaaaaaatgagacagaagacaaagacagaggtcagaggccaaaatatggggagacagacagatttagagagagacccagagggtaacgaggtaagaacaacacacaggcagagagacagagagacagacagacagagagaggccgtcagacatcaggtctgacagaccagctgtgggattcacttcctctctttgggcctcagtttccctcctgaggacttctcaatgacgtccttccttttctaacatttgaggtctagggctggaaggaatcagaggttttccgcctcccagaatcaaacgattctcctgcctcagcctcccgagtagctgggattacaggcgtctgccaccacgcccggctaattttttgtatttttagtagaggcggggtttcaccatgttggccaagctggtcttgaactcctgacctcaggtgatccgcccacctcggcttcccaaagtgctgggattacaggcgtgagccaccacaccaggcccagcagttatattaaaaaaaaaaaaaaaaaaagccaggcacagtggctcaagcccgtagtttcagcacttcgacagctgaaggcaagaggatcagctcagcccaggagtttgaaatatggcccagaaagacagttcctgtgagatacacacacagagacggaagaggtgaatttgggtcggggttggggggtggggatagggaggggtgcttgggtcccgttgtcctttctctaaccttggtagatgtcctggagagaaccagccccacagaattccatgcagatccagagtttctgcaacctgcagtggttcaagagtaagaataataatagcagtaaatacattattatttgcaggaaagcccctggtttgcttctgtcttgttctagttcaataagaactttaacgtaacagctctcatcactccacctctccttgtctaccagagtgaggttgtttcattcccattttacagacaaggaagttaaggctcagagaggaaatgtgagttccggggcaagtcaactcaaacctaggcctttgggcgggaccccactgccgtcccacgccaacctaggaggcagggcagagatctcacgggttgtggagatttggaggggacagaggggcccagggcacctgttctggggagcagaggtcattattggggcatctggaatattaatttggggatcagggaatttaggagtttatattaaaggagcagagagtgaaactgggtgagccaaagagcagaatggtgagagcttcgtttcaagggagttgatttcaaattcagttactatgaagagatcaatttggggtactcttggtcagaaatgggaattttagattggagattagattagaggctgctctggtcagaaaagtgggacttaggagtgaggatcatggtagggttagcccagtcaaaaatgggggtccaggatgggaggtcgggttatggtgagaaatggaagttcaaggttagaactgagggtgccaagaccaggcgcggtggatcacacctgtaatcccagcactttcggaggccgaggcgagtggatcacaaggtcaggagttcaagaccagcctggccaagatggtgaaaccccatctctactaaaaatacaaaaatttgccgggcagggtggtgagcgcctgtaatcccagctactcgggagtctgaggcagagaattgcttgaacccaggaggcagaggttgcagtgagctgagatcatgccactgcactccagcctggcaacagaacaagactccatctcaaaaaagaaaaagaaaagaaaaaaaaagaactgagggtacccccatcaagaaatggggactccgggttaggggctgggctgggtgccagggtgggtctgaggttcatcaccagagataactcccatggtaggccacgatgttggcgtgccggcaagttttcaatatgaggatttccttctgaagggtggagacatcatcatctgtgaggagggcgggagagaaaaggcagctcgcatggggagagagctacaggggaggtgatcccagtgtcccaggaggcgaaggtggggatgtggggaaggagctccatgttccctcctcaccaggctccatcttcaccatcttcagtgccaccaggtcccctgacaccttgtctcgagccttgcaaaggggaagttggcagtcaggcaggctccatttgccagagtccctccacagcatccctgagtcaaggtcaagaactgggaccccctcttgcagcctcctccctgccgagggcttgccttaaaggtcactggttgtagggtgttggggacagaggggcttcctcaccttaaagacttccccatacgtgccgccacccagccgctgtagcaggtcatagtggtcccgggggtctctattgaaaatgtcagggtccacgacgtccatccctgggggcctgagctgggcctgcgcccaggggccagcagggcctcagggctcaacttctggcacctccctccgtccccagaagccctgcacccgccttgcctccgcgggctgtggcctcccccctcctcactctcgcttcctgccccagctgcactgcacgactgtgcaacgggctccacccccccgtcccctgggctctgagagcctctgaggggcagcttgtcttgggacccaagggaccaccctcaacctccaaggcccagggctggatgtaaatgtgatgcaaatgatcttaatcgtaactgggttggaggggggtgccttagaacccccgcccccgtctcctaggtagtgtctaaacctctgctgggtgcttgaaggtttggccacaacccgaaggcggcaggtctgcaaagggatggctatgcagtgtacatgcctgttcacctgtcacatacatgcacttgggttacctcctctgcactgcgcaggcgtgtagacgtgcatctgcctggatacctgtgtgcacagtacacacgtggatgtacccaggacatatacctccacatgcatggcacataactgcattttgtaggcctgcagtgtacaaaacctatacataatatataattcatggcagtacaaatgggacgctcgccctcagctccaagaccggaacctaatggagacggggcgcgatccggcgaagtccaggagccctcaccccagcccctgcccggcagagcacagtagctttgtgggaccctcctcctggagctggggaccaagggctgagacttgaaactggagagctcaggatcctgcaccaggcgcccaggcctgtggcaagagggacctcagaacacctccctcggaacttggccatggcctaaacgtaaggctgctgcgtgcattcccgcagagctccgtggcctcatggccgcgcgcaatacaacgcgcgcgcacgccgccagagctccgggtgcttcccggtgagttcgcgcgcgcacgctcccgcgctaccggcactggaactgggtctgtgaggcccgggaaaagcttagccccgccccctcgccacgagaggcgcctgcgcactgggatccagtaagatttttctcacgctgtctgtccagcttgagtggcgcgaatgcgcacgcgccaattgcgcctgcgaggaagaagtcacgtggcagccggaaagcgtggcggctgctgctagagcctttccctttaccgcacccaaggagctggagcgacaacaacgacgtcgtttccgtttccaccacctcttcctgttcccgtccttgaggacgccgtgccgggtcagtgttagcctccagccctggttgtggaaggcgacagaagtcatggcgatgtttgagcagatgagagccaacgtgggcaagttgctcaagggtatcgacaggtctgagcccggttggaggaagcgctctggccaagcggggcggaggagagggttttccggagacagcaaggggtgttcagggtcctgggcttgccgcggggtggggtttctctatcctcctggaggaggagatgcttaaagaaacggcactgagctgggggtagtggctcacgcctgtgatcctagcactttgggaggccgaggtaggtgggtcgcctgagcccaggagttagagaccagcctgggcaacagccaaaccccgtctctaaaagaaagaaacaaaagcactgcaaaggcctagaagcgagagaatcttggtaccactcagtctcttcgtaaattgccttaaggtttccttctctgctccgcctcctttgagtgcctcttaatctctcccttctctgctctataagtcattcattctccacacgtttactgaaataaactgtcagtgctaggcaatgctgggaaccacaggcgaatcagacagcggcagatcatgccttcacggtctgagttccctttccataagggagacaaacctgacagcagacagcgatagccgggagagattagaactgaaatgggggaagcaaaggccagagtgttcaggtggacatggaggaagtaggcagcgaggtaggcaggagaggatggggctggatcagggtggaggcctgaacaggggaggaaggggtgagtagcagagacattcaggaggccaggtgtacaagctgcagtgactgactggctcagaggttgaggaggcatcctagggaagagccagggctccagtggagtttagagcttaggcgagaggtctgggataagaataagttttactagagattatactggacataattcactacctggatagagcaagtggccagtgccagatttagaggggaagggcgggaggagcaggttacagtggccccttgctccataaggtggctggcctcagcttctgtctcctctgtgctcacctatcttgattctcctttaggtacaatcctgagaacctggccaccctggagcgctatgtagagacgcaggccaaggaaaatgcctatgatctggaagccaacctggctgtcctgaagctgtaagtgtctagctctctgtctacactcccattgcagcaactagcagggtgccactcccagtacagggcaagggggtggctggtagtatcctgaacaatgcagcatctcttggtgtgcaagactaggaagccaaggaagttgggacaggaggagggatggtttttgaaaaatcaattgccgggcgcggtgactcacgcctgttatcccagcactttgggaggatgaggcaggcggatcacctgaggtagggagtttgagaccagcctggccaacacggagaaaccccatctttactaaaaaataccaaattagccaggcgtggtgccacatgcctgtaatcccagctactcgggaggctgaggcaggagaattgcttgaacccaggaggcggagattgtggtgaaccaagatcgcgccattgcactccagcctgggcaacaagaccgaaactccgtctcaaaaataataataaaaaatcaattagggtggccgcaggggctcatgcctgtaatcccagcactttgggaggctgaggcgagagactcacttgagccaaagagttcgagaccatccatggcaacatagcgagacccaaccctacgaaaaaatttaaaaattaatgtagcggtgtgtggctgtagttccagctacttgagaggctgaggtggaaggatcgcttaagcctggaagattaaggtgcagtgagccatgatagtgccactgcactccagcctgggggacagagtgagacccctctttttaaaaaaaaaaaaaaaaaaaagaattaccaatttgggtgacatggcacaaccctgtctctacaaaaattagctgggcccagtggcgcatggctgtagtcccagctccttgggaggctgaggcaggagaattttttgagcctgggaggcagaggttgcagtgagccaagatcataccactgcactccagcttgggcgacagagtgagaccctgtctcaaaaataaataaaggttaattacagaacacatgtacaggctaatacattaagcaaacatgtagtttaacaaatcattataaatgaaagcctacataatcaccatttatgttgcaaagttattgctagcaccacaggctctttgccccctatgctctatgccaaccaattcccctgctcccccatgctctcatggcctggctttatgtgatggtttactatgcatgcatacatctggctcagctcagctcaggtttccctgctttgaacttgatacagatggagtgcatacagcacaaactcttctgcatttgccatttgctactcagcactgggtttgtgagatccatccagtgttttttgtttttttgttttgtttttgatatggctgcagtttgttgtcatggatgtatagctctccactgtgtcacttgtgtggctgtcctaatgatctcttctggctcttgatggacattgtgggttcttcgtgcccttttttttttttttttttttttggagacaggatcttctgttgcccaggctggagtacagtggcacagtcatggctcactgcatccttagccttctggactcaagtgattctcccgcctcagcctcctgaatagctgggactacaggcatgcaccaccatgcccagctaattttacttgggtgctttctttctttccttttttttttttttttgagacagggtctcaccttcttgcccaggctagagtgccttggcgtgatctcatgatctcaactcagtgcatcctttgcctcccaggttcatgtaatcctcctgcctcggcctcctaagtagctgtacgtatcggggggcctgccccgataatcacgtaggttcttttctatattcctaagcattggctggcttgagaaatagaaggacagagtacaaaagagagaaattttaaagctgggcgtccgggggagacatcacacattggtaggatccgtgatgcctcacaagccacaaaaaccagcaagtttttattagggattttcaaaaggggagggagtgtgcgaataggtgtgggcgacagacatcaagtacttaacagggtaatagaatatcacaaggcaagtggaggcagggcgagatcacaggaccacaggatcaaagcgaaattaaaattgctaatgaagttttgggcaccactgtcattgataacatcttatcaggagacagggttttgagatcaaccggtctgaccaaaatttattaggcgggaatttcctcttcctaataagcctgggaacgctatgggagacgagtttatttcacctctgcaatctcgactataagagacaggtacgccccggggggcccgttcagagacctacccctaggtgcgcattctctttctcagggacgttccatgctgagaaaaagaattcagcgatatttctcccatttgcttttgaaagaagagaaatatggctctgttctgcccggctcaccggcagtcagagtttaaggttctctctctcattcccggaacaattgctgttatcctgttctttttccagggtgcccacatttcatattgctcaaacacacatgttgtgcaatttttgtagttaacgcaattattacagggtcctggaacgatatacatcctcctcaactgacaggattaagagattaaagtaaagacaggcataggaaatcacaagggtattgattggggaagtgataagtgtccatgaaatctttacaatttatgtttagagattgcagtaaagacaggcataagaaattacaaaagtattaatttggggaactaataaatgtccataaaatcttcacaatccacgttcttctgtcatggcttcagccggtccctccgtttggggtccctgacttcccgcaacaggtacgcaccaccatacccagctaatttttgtatttttagtagagacagggttttgccatgttagccaggctggtctcgaactcctgacctcaggtgatccacccgccttggcctcccaaagtgctgggattacaggcgtgagccactgcacccagcctaatttttgtatttttagtagagacggggctttgtcatgttggccaggctggtctcgaactcctgatctcaggtgatccgcccatctcggcctcccaaagtgctgggattacaggcttgagccacccacctacccacccccaccgccaccttctgttgtcctcttttgcaagggaggaaaccgtcagcccctcagtttcctttctctgctcctcagcctttcagtgcctcttaatctctctcttctctgctcctcgtgtcataaataagcagtccaaggtcactcagcagggaagtttaaaccgaggcagtctggctctggttccttagccactactccagaccactgctgctgttctcatttgtttataaatcacttagcagtgtctgccccattgggtagttgtgagcattaactgtccctgttcacagaggagaaaggtaggctcagggaggtgaaggttacacagctgggaagcactgggactgggattggaacccaggcatgtccaattcccaaactccagaataaagcagctgcctggcacctggtgaggattggggacttggaggtgccactgtggccacgtctcttgttctttttcttaggtaccagttcaacccagccttctttcagaccacggtcaccgcccagatcctgctgaaggccctcaccaacttgccgcacacagacttcaccctgtgcaagtgcatgatcgaccaggcacatgtatccttccagcactggggccggggggtgtgtgggaaggggtcagagtcaaggtgcatgaattcccagggagatggtctgtgggtgtatccacaaacaacaagtgcctgctctggtccagcgtggcaaggtgctggacagtgctgggacactggtgactgagacagtcctgggccctgtcttcacaaagttgtcgcagtccagtgaagagtcagtgatagactggagtggtcagggttgggttacaagagtcacagcagccgggcacaatgactcaggcctctaatcccggcactttgagaggtcaaggtgggtggatcacctgaggtcaggagttcgagaccagcctggccaacatggcgaaaccccatctctattaaaatacaaaaaattagccaggcacagtggcacacacctatagtcccagttactcaggaggctgaggcaggaggatcacttgaagctgggagatggaggttgcagtgagccgagattgcgccactgcactccaccctgggtgacacagtgagactctgtctcaaaaaaaaaaagaagagccagagtaggcacctgaccatttgggtgggggaatatgtggacatgaacacagccatctgtatttacattctatagaacaatgtctggaaaggtggaaaggtacccaagaattggaaatgactgttacctcccaggaaggatggctgtgagacagggaagggaagacctattttgccactgttcactcttctgtatttttaactagaaactataaaccagggcctcctggaggagggaacatctaaaacataacgagttaggtggaggggtaggcaaaggtgatccaggcagagaggacactcatgggctaaaggaagcagagctcggtgctgtctttcaggaatggtagaggaagcctgacataggaatgatttaaggtgggtttttttttgttgttgttttattttatttattttattttttttttgagacggagccttgctctgtcacccagtctggagtgcagtggcgtgatctcggcttcctgcaacttccacctcccaggttcaagctattctgtctcagcctcctgagcagctgggaccacaggtgcatgcatgctaccacgcccagctaatttttgtatttttagtagagacggggttttgctatgttggccaggctgctctcgaactcctgacctcaggtgatccacccgcctcagcctcccaaagtgataggattacagatgtgagccaccgtgcccagcctataggttttattttattagtaataatagtagggtttttttgttaatattttctttttttttgagatggagtcttgctctgtcatccaggctggcgtgcaaaggcgtgatcttggctcactacaacctcctcctcccgggttcaagtgattctcctgcctcagcctcccaagtagctgggactataggcacgtgccaccacacccagctgcttttcgtatgtttagtagagatggggtttcgctatgttggccaggctggtgtcgaactcctgacctcaggtgatccacccgccttggcctcccaaagtgccaggattacaggcgtgagccaccaggactggcatgtcatttctcatcttttgccattacaaacagtcctgcagccaacatcctttctcctgcatacacctgcaggagaaataagctggcttccttttccagctgtttttctgagctgaagctttggaagaaagcagccagaagaaggtaggtggggaggggtgatctggggtccaaccttacgctccgaggccagttttccttaatgcttcctcctcccagcaagaagaacggccaatccgacagattttgtacctcggggacctgctggagacctgccatttccaggccttctgggtaacttccctggggtccaggggcaggggagatggcagggccatgtggagctgagtgctaaaagtaacaacggtgcacactgactggcttcctgctttggcggtgggcccagtgctctgcatgtgtgtgtttgtggaattatcatcctctcgcggagcaggtactcacaggtcatccccgtgcccacaggctgaggccgaccctttcccctttctcccatctttccactgagccctctagtacacaccgttgatcagaagtcctccagtggctgggtgtagtgactcacccccgtgattccagtacttgtggaggccaaggtgggaggattgcttgaggccaggagttccagaccagcctgagcaacatagtgaaacttcatctctacaaaattgaaaattaattgggtgtggtggcatgtgcctgtactcccagctacccaggaggctaaggtgggaggatcgcttgaggctgcgagtgagccgtgatcacaccactgcactccagcctgggcaacagagcaagaccctgtctcaagaaagagaaattctccgtctcttctacctgtctgacatgctctgcccttcttgctctaactggaacctggccccccacttctgcagccccctaagtgggaggctagatcacctcctggctcctatctcttctgataccctcagtcttttttgttgttttttgtttgtttgttttttggtttttttgagatggagtctcacgccattgcctaggctgtagtacagtggcacgatcttggctcactgcaacctctgcttcccgggttcaagtgattctcctgtctcccgagtagctagtactacaggcacacgccatcatgcccaactaaattttatatgtattttttattttattttgttttatttttgagacagagtctcagtcttgcccaggctggagtgcagtggcgcgatcttggcttactgcaactgccgcctcccgagttcaactgattctcgtgcctcagcctcctaagtggctggggttacaggcatgtgccatcacgctggctaatttttgtatttttagtagagacggggttttgccatgttgtccaggctggtcttgaattcctgacctcaggtgatctgcctgcctcagcctcccaaagtgctgggattataggcgtgaaccaccacgccgggccagaaacccccagttttgaagtgtgtgtgtcgtcacttcctgcccggtatcagtccctctggtgactgctctttgtttcttgaagaattcagcccctggctggccacggtggctcaacgcctgtaatcccagcactttgggaggccgaggcaggtggatcacctgaggtcgggagttcgagaccagcctgaccaacgtggagaaatactgtcttaactaaaaatacaaaattagctgggtgaggtggcacatgcctgtaatcctagctgctcgggaggctgaggcaggagaatcacttgaacccagtgggttcaacctcacccagaggttatggtgagctgagatcatgccgttgcactccagcctgggtgacagagtgagactccgtctcaaaaaaaaaaaaaattcagctccttctcactggcgctctctaccactcctgccctaattcttagacgcttagaaagtaacacagaggatcctttgaccacccagacctctgggtcccttgctctcttggccagctatcttgtgctacacctgacctcagcccttctcttccaatcataccccaggccagttctctgcacattagacctctgaggcatttattttctttcctttttttttttttgtttgagaccatgtctcgctgtgtcacccaggctggaatgcagtggcacaatctcaactcactgcaacctctgcctgctgggttcaagcaattttcctgtctcagcctcccaggtagctgggactacaggcatgcaccaccccgccggctaatttttgtatttttagtagagacggggtttcaccatgttggccaggctggtctcgaactactgacctcaagtgatctgcccgccttggccttccaaagtgctgggactacaggtgtcagccaccacgcccggacctctgaggcatttttaaaaattaatactgatacttgggtcctccctcacagagtctgatgtaattgcttcagtgtagcctaggccttgggattttaaaaggttaccctgggtgatttggacatctggccaatgttgggagccactgccgtcaccaataatggctcccctcctccctctgtgagtttccagcatctccattctctgaccgcttcctcctagcttctcagctcacccccacagggtctccatccccacattcttgggcctgaccattagctccaaccctctttctctgcaggcttctctgttccgcttccttctcttaaatcgcatgtgctggctgggcatggtggctcacacctgtaatcccagcactttgggaggccgaggtggatggatcgcctgaggtcaggagttcgagaccagcctgaccaacgtggagaaaccccatctctactaaaaatacaaagttggccgggcgtggtggcgcatgcctgtaatcccagctactcgggaggctgaggcaggagaattgcttgaacctgggaggcggagattgcggtgagccgagatcatgccattgcactccagtctgaaaaagagcgaaactccatctcaaaaaaaaaaaagagaaaaaatgtcgcatgtgactcccctgtccccagctgcagctacggtcttgcttccttccccaactcctggatgtttcctcatgctttatctgtctccctttcttctcacctcaacttatgatctggcttcttgtctcgggagaaaatggaagcagccactgtagaaattgcacctgttcctatcccagaccctgacattttatgtgcagctgactgcacacttttttttttaattcttaaacattttattttttattcaagtaagaaattattgattagcttcagttaatcccacaaagaaaatgatcaaatgcttaaaataatagagtttactagttctacaactgttctcactagcaaactagcaaatgagatgtgttggagatcttagacctattccatggaacagatagacaggttttttttgtttgtttgttttgttttgttttgttttgttttgttttgttttgttttttgagacagggtctcactctgtcgcccaggccgcagtgcagtgatgcaaacacagctcactgcagctttgacctcccaggctcaagtgatccccgcacttcagcctcctgagtagctgggactaacaggcccacgccaacacgcctggctaatttttctatttgtagtagaggttggatttcgccatgttgaccaggctggtcttgaacttctggcctcaagtgatcctcctgcctcgcctcccaaagtgctgggattacaggttgagccaccacgcccggccacaaatctggatttctgcccacctcactggctacaccttcccggcatccatgtgggggattccctcccttttgttggagagaacctataccacagacctaacctttgagcagaaatctgaaggaggtgagggtggtagccatggaggagaattccatacacaggccctgaggtaggcgggtgtctggcgggtttggggagcagcagggaagcccctgtggctggagcagggtgagtgagtagcgagtaggtggaggtgagggcacagaggtgacaggcagattctgtgtggcctaatgggctatggtaggaaaattggccttttctctgagtgagacagaagcaaggggaggtggctgaatacacttagccaatatgtgtctgccccctttctcagggctctggtttctgcctgccaggttcaagcctcacctccaggatttttggaaaatcatgtagctgccctggtctcctcatctctaaaatggatataacttacatcacatggctacacttagaagaatggctatagcatgtggggtcagtgctcaaagtggtagctgctttttttttttttctgaaatggagtatggctctgtcgcccaggctagagtgcagtgatatgatcttggctcgctgcaacctctgcctcccaggttcaagtgattcttctgcctcatcttcccaagtggctgggattacagatttcaggcatccaccaccacacccggtttaattatttatttatttatttatttttttttttttttgagatggagtctcgcgctgtcgcccaggctggagttcagtggcacaatctcagctcactgcaacctctgcctcctgggttcaagtgattcttctgcctcagcatcccgagtagctgggtctgcaggcacatgccaccacacctggctaattttttgtatttttagtagagacgaggtttcaccatgttagccgggatggtctcgatctcctgacctcacgatcgcccgtctcagcctccccaagtgctgggattacaggtttgagccaccacgcccagccagcctaatttctgttttttgtttgtttgttgttttttgttttgttttgttttgagacagagcctccctctgtcgcccagtctggaatgcaatggtgtgatctcggctcaccacaacctccatctcctgggttcaagcgattctcctgcttcagcctcctcagtagttgggattacaggaatgtgccaccacgccctgctaattttgtaattttagtagagtcagggtttctccatgttggtcaggctggtctcgaactcccgacctcaggtgatccgcccgcctcagcctcccaaagtgctgggattacaggcatgagccactgtgcctggctgatttctttatttttagtagagacagggtttcaccctgttggccagggtagtctcgaactcctgacctcaagtgatccacccacctcagcctcccaaagtgctgggattataggtgtgagccaccacacatggcctggtagctgctattcttgttaacattactgaaggggtgggttgcccctccacacctgggagtgtttctcgttaggtggaatgagagacttggaaaagagacatagagacaaagtatagagaaagagaaaagggggcccaggggaccgcgttcagcacacggaggatcccaccggcctctgagttcccttagtatttattgatcattattgggtgtttctcggagagggggatgtggcagggtcataggataatagtggagagaaggtcagcaggtaaacacgtgaacaaaggtctctgcatcataaacaaggtaaagaattaagtgctttgcttttgatgtgcatacacataaacatctcaatgccttgaagagcaatattgctgcccgcgtgtcccacctccagccctaaggcggtttccccctatctcagtagatggaacatacaatcgggttttacacgagacattccattgcccagggacgggcaggagacagatgccttcctcttgtctcaactgcaaagaggcgttccttcctcttttactaatcctcctcagcacagaccctttacgggtgtcgggctgggggactgtcaggtctttcccttcccacgaggccatatttcagactatcacatggggagaaaccttggacaatacctggctttcctaggcagaggtccctgcggtcttccgcagtgtttgtgtccctgggtacttgagattagggagtggtgatgactctcaaggagcatgctgccttcaagcatctgtttaacaaagcacatcctgcaccgcccttaatccatttaaccctgagttgacccagcacatgtctcagggagcacggggtaaggttacagattaacagcatctcaaggcagaagaatttttcttagtacagaataaaatggagtctcctgtgtctacttctttctacacagacacagtaacaatctgatctttcttttccccacacattactgataagaacgttgttgataggtaagattaccagtgtaggctgggagtggtggctcacccctgtaatcccaacgctttgagaggccagcgtgggcagatcacttgagcccaggagtttgagatcagcctgggcaatatagtgagacctcgtctatgtaacaacagcagcaacaaaatcttagcactttggggggctgaggcaggaagatcacttgagcccagaaattcaagaccagcctgggcaacgtagtgagaccccatctctataaataaataaaaataaaagcaaataatttaaaagaataaacattgtgaacatcaattcccatcacagcaagccctggatgaaaacatggacctcttggaaggtataactggctttgaagactctgtccgaaagtgtaagtccctctctgaggctgggctccccaaggggaaggggtagggagtggcagccaggtccggggggacagctgctcaccggttttgtctctgacctccacagttatctgccatgttgtgggtatcacttaccagcacattgaccgctggctgctggccgagatgctcggggatctgtcgggtaacgccctctgggtcctggtgcacatctgggaggttgggggtggctagggcagtggacctcagtcagctcctccaacaggcctgtctgggtctcatcaggtcagcatggaaggcccagcccaaggaggaaataagaacttggtataagacagtctctgccttgagggagatcctatgccatttgctcatttattttgcattaattgagtgcctaccgtgtgtcagtgtgctaaactgggcgtgcagcagtaaacaaagtgggatggctccaattcattctcatggaggtagcaaagcacatggcgacatggaggtgtccagtggtgattcctgtcatgaaggaaagcaagacagctcacagaccagcggcatctgagcccttacctccgtagagagaggcccgtggcctgaggtagtgcagaggaggatagtagagcagggccctgacttgtaacgttcatgggtagccagggtgtatgtggccagagcagagtaagcatgggcgaaagtagagagctgggggttggaggggcatttccaggtcatgtggggcctcgggaggaccttgtcctttcccctgactgagaaggagccaccggagggctctgagcagggtagggctctgatcagatggatattttttaaagatccccccaagaacaaaaaaagaaaaaataacttatttgcttacttttgtaaaaagaaacgtagaaaaggaagtcaagaaactaaggaaggccgggtgcggtggctcccgcctgtaatccagcactttgggaggccgaggtgggcggatcatctgtggtcaggagttcgagaccagcctgcccaacatggtaaaaccccctctctactaaaaatacaaaaaattgctgggtgtggtggcgtgcacctgtaatcccagctacttgggaggctgaggcaggagaattgcttcaacgcaggaggcggaggttgcagtgagctgagatcgcaccattgcactagtgataagatcgaaactccatctaaaaaaaaaaagaaactaaggaaggccacgtgtgatggctcataccagtgagggaggcagatcacgtgaggtcaggagttcgagaccagcctggccaacatggggaaaccccgtctctactaaaaatacaaaaattagctggacgtgttggcatgtgcctgtaatcccagctattcgggaggctgaggcaggagaaccgcttgagcccaggagcagaggttgcagtgagccaagatcacaccactgcattccactctgggcacttttagtagagaaggagtttgaccatgttggccaggctggtcttgaactcctgacctcaagtgatctgcccaccttggcctcccaaagtactgggattacaggcgtgagccgctgcatccagccaagtaaaagctaactttttttttttttttttttttttttttgaggtggagtctggctctgtcacccaggctggaatgcagtggcataatctcggctcactgcaacctcctcctggtttcaaacaattctcctgcctcagccttccaaatagctgagactataggcctctgccacctcgcccagctaattttttttttttttttttttttagcagagatggggtttcaccacgttggccaggacttggcacggtggctcacacctgtaatcccagcactttgggaggccaaggtgggcggatcacctgaggtcgggagttcgagaccagcctgaccaacatggagaaaccccatctctactaaaaatacaaaattagccaggcgtggtggcgcatgcctataatcccagctactcgggaggctgaggcaggagaattgcttgaacctgggaggtggaggttgcagtgagccgagattgcgccattgcactccagcctgagcaacaagagcaaaaactccgtctcaaaaaaaaaaaagtgtattgtttctggtaatggtcatgttataattttgcaaccgtttcatataggttgtgggaaaaggtagataaatacgctgctcttgttaggaaccaaaatttgcccagggagagaaaacagaggaatagaaattaaggcagaagccccacgatgaggctgaaagagctcacaggctccctctggcggccattcagagaatgacccgtggaagggcaggggcggaagcaaggagaccaggccagctgctgctgtccaggagatgtcagtgggcaaggggggctgccctggcttcctgagccatgactctgttgcctctcagtcccctggaactgtgggatcaggctgactgaagccccttgctgcccctgtcacctgcagacagccagctaaaggtgtggatgagcaaatacggctggagtgccgacgagtcggggcagatcttcatctgtagccaagaagagagcattaaacccaagaacattgtggagaagattgactttgacagtgagtggtgacccacggcctcgggctttggggctaagggggtgcccctcaagggaggccgaggcaggggcccagaggacctgggtagatctgctcgtgttctgggctgggaagtctgcacctgccagattccattcaccttgtgtcttggggctcccgcccaggaggaatagcggggagctgggtgatcttccctggaacttctaggccctgtgtcctgccccatagcactcagcaagacttcctggggcccagcggggcctcacagggggtctctgcacccttatttgtccctgaggcctgtctcgttggccatcttttattcttggggtgcccaagcctcatgtgcagacttggaatccggtgaacagtaggaatcttgattctctagtttgggtgattccacatttttgtgcctcagttttctcatctaaaaaatggggacgactgcaacagtaactatgataaacactgtgtaggtccttacacttacatcatttgatcctcagttgctaaatgatataaatagtatcatacctacctcatggcatcataagtgtgaatgcatgtataacacttagcaaagagctaagtgaccacacagttcattaaatgttcattatgaccatcgtctacacacatgtaactaacacaggctcaactgcttgctcaactaaaaagattgcagtggctactccggcagcgggtgctgcttcactgccgctcatcatggcactgagcagatgtcctggagccagggagaaaggcacaggcgggctgctgccttcatcccgggtctcccccacccgcttgagtgtgattcaggtgttttaaagatgtgtttggtacaacgtggtttcttaacacaaaccagctaattttgtacttaactggggaacagcattgagcaggcagccatctgcgcacttgcagcccgtggtatctcacctctaaacgccgcgtgactgctgtgtcggggttctcagtgagaactccagcaaaagattctgtagtgaggaaagggcctcctttcttctcccctttggcttctgttgccccaccccaccttcctgaccttttaggtcacaggtggagagggcagtgctgagtcaacaaggaaaaggaggaggaaggtgtgaatctcagggaagtaggagcccagccctgccgggggagtagacgggagggttccctctgtctcagttctggctccattgctctgtgtcctgggtcaaacaggataggttcaaaatactcaggaggctgaggcaggagaatcacttgaacccggaaggtggaggttgcagtgagccaagatcgctccactgcactacagcctgggcaacagaatgagactgtgtctcaaaaaaaaacttaagagtatcctgcaaatagtacctagtaaatattatcatgtaggtaattacaaacaacacttccttggcactttgttctaagcacctcgtttggtcctacaatcctataaggtaggtgcttcttaaagataggaaggtaggtgatgctcagagatgttcagtaacttgtccaagtgacccagctgttaattggcagagctgggatttgaacctagccctccttgctccagagtccatctttttaaaatactgcaccaaactgcctttgtgatggtaactggggcctggaaggagtttatgatctccccctaaagaattgtgggtgctgtagcaggtggctggaggtttgtctcccgcccttctcaccttcagtctggtctctccttccccacaggtgtgtccagcatcatggcctcctcccagtaacttcaggtgtttaataaagatgtgttgactcagccctactgtctcctccctggcttcctgcctctgccccttgcccaccagagggagctcaggagcaggcctctgctctgggttggcccccgcaccgtacccccagcccccaccacaccacaccccatggcggggtttccgcctcctttttcccctgcttcgacttcctcccttgccccaccctaccttcctgaccttttaggtcttgggtggggagggcagcattgagtcagcaaggaggagggagtatgaatgggatgtggcagcccagccctgtggtggaggctgagcacctctgggaggagtgaaggtgaagtttccctctgtcttgatggtggctcttgctttgtgaccttggtcaagggactgtgcctcttttttttttagacgaagtctcgctctgtcgcccaggctggagtgcagtcgcgcgatctcggctcactgcacgctccacctcccgggtttatgccattctcctgcctcagcctccagagtagctgggactacaggcgcccgccaccatgctcggccaatttcttgtatttttagtagacagggtttcaccgtgttagccaggatggtcttgatctcctgaccttgtaatctgcctgcctcggcctcccaaagtactgggattacaggcgtgagccaccgcgcccagccgggattgtgcctctctaattctcagtttcttcatctgcagaaggggaagaataatgcacccttctgaaacctgtgagggtttctccggcccttgccagtaaaggcctgagattggggcctgtcctgtcctgtccttgctcttagaaaatgtgagccacaggccgggtgcagtggttcacgcctgtaatcccaacactttaggaggccaaagcaggaggattgcttggccagagtttgagaccagcctgggcgacagagtgggactccgtctcaatatatatatatatatatatatatatattttttttttttctttttctttttcttttttttttttttagagacagagtctcactctgtcgcccaggctggagtgcagtggcgcgatctcagctcactgcaacctttgcctcccaggttgaagcaattcttctgcctcagcctcccaagtaactgggactacaggcacacacctccacgcccggctaatttttttgtattttagtagagatggggtttcatcgtgttgcccaggctggtctcgaactcttgggctcaggcagtctccctgcttcgacctcccaaagtgctaggaatacacacgtgagccaccgcgcctgaccaaaaagtttattttaaatagctaggcatggtggcgcgtgtctgtagtcccagctatttaggaggctgaggtcggcaaatcacctgagcccaggaggtcaaggctgcagtgagctgtgatcacaccactgcactccagcttgggtgacagaccctgtctcaaaaaagaaaatataagccattgttaatttcaggctcagaagtgtttgtcaccaaggttgcaagctagtcctcagtactattctgtatggagagacttcatgagaaaattagtatatatatattttttcctctcaaggtgtcataggtagacagctccttcagccacaccattctttccaagtcgcatgccgctcccctggttagtgttacctgacaggagacctgactcaccttacatgttcattcccttcttacctgaggaatttggggcactcccagtggcccttaggcagtgcttttcccctgtgagcatattgcctggagggctagggggttgggggaatgcaggaattaaaaagacccagtagaggctggtttatgcctgtaatcccagcactttgggaggctaagggaggaggatgactggaatccctctacgcaaaagtaaaaattagctcaggttgggcatggcggtccatgcatgtaattccaacagtgggaggctgcagcaggaggattgctgaaagccaggagttcgagaccaggtcaacaaagcgagaccctgttcctataaaagttttaaaattaactgggcctggccaggcacagtggctcacgcctgtaatcccaacactgggaagccaaggcagatggattgcttgacctcaggagttcgaggcgagtctgggcaacatggtgaaaccctgtctctacaaaaaactacaaaagaaaatagccaggcatggtggtacacacatgtaatcccagctactctggaggctaaggtgggaggatcacttgagcctgggaggcagaggttgcagtgagccaagatggcgtcactgcactccagcctgggtaacagagtgagaccctgtctcaaaaataagtaagttggccaggcgcggtggctcacgcctgtaatcccagcactttgggaggccgaagtgggcagatcacgaggtcaggagatcgagaccatcctagctaacacggtgaaaccccgtctctactaaaactacaaaaaaattaggcaggcgcctgtagtcccagctactctggaggctgaggcaggagaatggcatgaacccgggaggcggagcttgcagtgagctgagatcgcaccactgcactccagcctgggcgacagagctagactccgtctcaaaaaaataaattaaaaaaaaaaagtaagtaagtaaaaattagccaggcacagtggtatgtgcctgtagtcctggctacccaggagtttgaggctgcaatgagctatgattgcaccactgcacaccagcccaggtgacagcaagaccctgtctccaaaaaaggaaaagaaatgccctaatagatgttcattacttagagtagactggcagctgccccttggtgatttattgatggatgctggtgtgcataagcgttgccttggagagggcagctgtggtacccaagctgccagccggcctgacctccctgtgtgcactcacagccagcattcctcagagggccctgcctgtgggagcagacaccccttgccctggggcccagacctcagcagggccccagtagccagggagtgcctaaatcctggggactgaacaaaagtgtgcctctgcagctcactgggataaaaaggactgggaggcctggcacagtggctcatgcctgtaatcccagcactttgggaggccgaggtaggcagatcacctgaggtcaggagtttgagaacagcctgaccaacatggtgaaaccccgtctctactaaaaatacaaaattagccgggcgtggtggcgggcgcctgtattcccagctacttgggagggtgaggcaggagaatcgcttgaacccgggaggcagaagttgcagtgacccgagatcgcgccattgcactccagcctgggcaacaagagcgaaactgcctcaaaaaaataataataaaaaggactgggatgcctctaccacccatgaacttgggcacattagcaaaaggcaccccttctgggtggggacaactcccagttacccacttggcaggtgcccttatgcaggatacaacctgcacaattggccatggctgctctgcaagggaagaggaaatgacctttttcccctcctctgggagccacatctcatcctgcctcactgggctgctttcactatcagagggtcattcatactccgaacagctaggaggtggctctggagaaaaactgcctgagttcactccccagcccagccgcctcagggtatgtgagttgtcttctctgtacctgttttacagctggggaaagtagtaattgtacccacgtcagtagttaatgcctgcaaagagtttagaacagcttggtgggtgcagtggctcacgcctgtaatctcagcactttggaggccaaggcgcgtggatcatctgaggccaggagttcgagaccagcctggccaacgtggtgaaaccccacctctactaaaaatacaaaaattagctgggcttggtggcgggtgcctgtaatcccagctactcaggaggctgaggcaggagaatagcttgaaccagggaggtggaggttgcagtgagctgagatcacgccattgcacttcagcctggacgacagagtgagaccttgtctcaaaaaaataagctgggcgtggtgtctcactcctataatcccagcactttgggaggctgaagtgggcggatcatgaggtcaggagttcaagaccagcctgtccaatatagtgaaaccccatctctactaaaaaacacaaaaattagctgtgtgtggtggcgcatgcctgtagtctcagctattcgggaggctgagacaagagaatcgcttgaacccgggaggcagaggttgcagtgagccaagatcatgccattgcactccagcctgggcaacagagtgagactccgtctcaaaaactaataataaataaataaataataaattaaaaaatagccggggcgcagtggctcatgcccgtaatcccagcactttgggaggccgaggcggatggatcaactgaggtcaggagttcaagatcagcctaaccaacatggagaaaccccgtctctactaaaaatacaaaattaaccaggcgtggtggcgcacgcctgtaatcccagctactcgggaggctgaggcaggagaatcacttgagcctgggaggtggaggttggggtgagccgagatcgcgccattgcactccagcctgggcaacaagagcgaaactctgtcttaaaaaaaaaaaaaatagccaggcctggtggcgcgtgcctgtaatcccagctactcaggacacttgaggtgggagaattgcttgaacccgggaggtggaggttgcagtgagccaagattgtgccactgcactccagcctgggtgacagagcgagactccatctcaaaataaataaataaataaataaaaataaaagaaactcaaattggttctgtctccaaattccatcctggtgggtgcttgtcatgctcacttggggttcagggctgctgctccagctgcttcctgagacatctctagacattgcagtatttgttcatgtccccgccctgtgaggacacaccctctctagttgccttccctgaagtagtgttaacaatgggatacagcatttaataaattctgactgaggtctcacgggttcaatggtaaacctaaaaacgcctgtagggcccactggccataccccttctctcagagcccctcctggtcccttggacatcaatagacacatcagctattattactacactgcccatagatggctgccaggaagtagcctcaaggctgacaattaaagggaggctttaatttaaacttcaatggctggggctgtcgcctccatctgggagcacttggtctggacggtttctcagagtccaccaggagctgcagcgaggggcagatggcccatcccctgaggagtttttcccccaggccagaccatgcataagagtcctgagctagttcttcaagtcaggctggaggagaccgccctgccctgccccactccagcccagctctggaaacagccaacacgcctgggggtctttggccaggtcctggcatctcctaggacatcgggctgctgcctgggcctcgtccccttcctctgctgtcactggatccatcccttcgcgttcctttggcagaggcagagaagcagagaaggatccttgcaactcccatagctggagaaaccataaaccatggtggttggttttttttttttttttttttttttttgagacagagtctccctctgttgcccaggctggagtgcagtggtgcgatctcagctcaccgcaacttctgccccctgggttcaagtgattctcctgcctcagcctcctgagtagctgggactacaggcgcgtgacaccacacccagctaattttttgtatttttagtagaaacggggttttaccatgttagccaggatggtctcgatctcctgaccttgtgatccgcctgcctcggcctccggaagtgctgagattacaggcgtgagccaccgcacctggcaatattttattttatttatatttttgagacaggttctcactttgtcacccaggctgaagtgcagtggtgcgatctcagctcactgcaacctcgacctcctgggctcaagtgatcctcctgcctcagccctccaggtagctgggaccactggcatgcaacaccacacttggctaatcttttgtattttttgtagagacagggtttcaccatgtttgccaggctggccttgaacatcccatgcccgatgggatgatattttaaatcaggtgatccgggaaagtctcactgaggatgtggtatttccacagagacctataggaaatggggctgtgagccctagggactcagtgtctggggaaagtgttcctgggagtcgtgactccacctcacaagtacaaaggcctcatcagaggctgagtttggcacctggtgtgcttgagggacagcaaggtggggggtactcgaaggctttttttttttttgagacagtcttgctctgtcacccaggctggagtgcagtgccgtgatctcagctcattgtaacctccacctcccaggttcaagcaattctcctgcctcagccacccgagtagttgggattataggcgtgcacctccacacccggctaatttttgtatttttagtaaagacgggatttcattatgtcgtccaggctgttctcaaactcctggtgtcaagtgatctgcccgcctcagcctcccaaagtgctgggattacaggtgtgagccaccatgctagctgactctaaactgtttcataaactaggttgaggcagggcttgggtggctcacacataatcccagcctgtaatcccagcattccctgaggtaggaggatcacttgaggccaggagttccaggccagcctaagcaacctagcgagaccacccccacacactcccctcacccccaccacttgtctctacaaaaaatttagcaattgccgggcacagtggctcacgcctgtaatcccagcactttaggaggccgaggtgggcggatcacaaagtcaggagatcaagaccatcctggctaatacggtgaaaccccgtctctactaaatatacaaaaaattagctgggcatggtggcaggtgcctgtagtcccagctacttgggaggctgaggcatgagaatggcgtgaaccagggaggcggagcttgcagtgagccaagaccgtgccactgcactccagcctgggcgacagagtgagactccgtctcaaaaaaaaatagaaattagccaggcgtggtggggtgcacctgcagtcccagctacttgggaggctaaagcaggaggatcatttgggcccaggaatttgaggctgcagtgaactggaacggtgtcactgtacttcagcctggtgacatagcgagttgctgtgtcaaacaccatcaccaccaccagcaccaagaacaatatcaacaaaacttggctgagctggatgtggtggtacgtgttcacagtcgcagctactcagaaggctgaggtaggagaatcaagagtctgagctcaacttgggcaaaatattgagaaccctgtctccaaaaacaaaaaactaaaacactgggctggccgggtagagtggctcatgcccgtaatccctgcactttgggaggctgaggcaggcagatcacctgagctcaggagttcaagaccagcctggccaacatggcaaaacccctctttactaaaaatataaaaattagccgggcatggtggcatatgcctgtaatcccagctactctggaggctgagacaggagaatcgcttgaactcgggatgcggaggttgcagtgagccgagatcatgccactacactctggtctgggtgacagggcgagactccacctccaataaaaaaaaaaaaaggaaaaaaacactgggctgggctgggctgggctgggcaaggcagggcagggcagactcctctgcagcctttcttcctttccttgactttgactgttaccctgagcgtggagccacaggaaggtttgaacagaggagggaggaatgtgatctgactcagtcattcattcacaggctccctccagcttctcctgggaaagagaagggggtgggagggggagctgggagacagtggggaactgctgcaatggcccaagggaaggcgaggcgagggtagacagaacctgggtggcgcagtggggcagggggaagtgggtgggttctgtgtattctttcaagatggaatgacagaatttcctgaagaactggatggggttgtgaagacaaagaggcattaaggatgaccgcaaggtctgtagcctcagcaactgcaaggctggaggtgcacgaattgaagagggatgactgtgggatgggatgaccaagcttggggggaagatcaggaactctattttggatatttattattattattatttgagatggagtttcgctcttgttgcccaagctggagtacaatggtgcaatcttggctcaccacaacctccgtctcccaggttcaagctattctcctacctcagcctcctgagtagctgggattacaggcatgtgccactatgcctggctaattttgtatttttagtagagacggagtcgttggcccggctggtcttgaactcctgacctggggtgatccgcccacttcggccccccaaagtgctgggattacaggcgtgagccaccacacctggccggatatttatttatttatttttatttttattttagacggagtcttgctctgtcgcccaggctggagtacagtggcgcgatctcggcttactgcagcctctgcctcccgagttccagtgattcccctacctcagccccctgggtagctgggattacaggtgcatgccaccaagcccggctaatttttgtatttttagtagagacggggtttcaccatgttggccaggctggcctctaactcctgacctcgtgatctgcctgcctcggcctcccaaagtgctgggattacaggcatgagccactgcgcccggccatttatttttaatgtaaacatttttttgtagagatgagatcttgttatgttacccagtctggcctcaaactcttgggctcaagcactcttccagccttgactccccagagtgctgggattgcaagagtaagccaccagtgcctggctgaatatttaaatttaagatgcttcctgatgcagtggctcgcacctttgtttaaatgtctgccttctccatgaagcctacctgagtagtttatttgcattccagcccatgcttgatttttctccaaatactcaacaccttggaatatacaatactacctattttttacttttatgtatatttttgagacaggatttcgcttctggagtgcattggtgtgatcacagctcactgcagactggaactcctgggctcaagtgatgtcccttcctcagcctcctgagtagctgggactacaggtgcacacagccatgcccagtgaatttttacatttcttgtagagacaggttcttgttatgttgcctaggctggccttgaactcttgggctcaagccatcctcccgcctcagcttcccaaagtgctgggattacaggtgtgagcccctgtgcctgtctacatattttttaaaattttgagtgttgaggccaggcgcagtggctcatgcctgtaagcccagcactttgggaggccgaggtgggcggatcacctgaggtcgggagtttgagaccagcctgaccaacatggagaaaccccgtctctactaaaaatacaaaattagccaggagtggtggcacatgcctgtgatcccagctactcgggaggctgaggcaggagaatagcttgaacctgggaggcggaggttgcagtgagcccagatcacgccattgcactccagcctgggcaacaagagcgaaactccgtctcaaaaaaaaaaatttgtgtgttggttgggcgcggtggctcacgcctgtaattccagcactttgggaggctgaggcgggaggatcgcttgagctcaagagttcaagaccagcctggccaacatggtgaaaccccgtctctactaaaaaaatacaaaaattagccgggtgtggtggagcatgcctgtgttcccagctactcgggaggctgaggcaggagaattgcttgaatccgggaggcggaggttgcagtgagccgagatcgcgccactgcactccagcctgggagacagagcgagactccgtctcaaaaaataataaaaataaaagtagatttgtgtgtatgtggcttcctttactagaaggtagtttcatgaaagttgggatttttttctgtttttagtgcctgcgtaaaacatagtctggcacagaataggtgttcaataaatatttgttgaatttgtgtcgctgaatgggaacccggtgcagtgcattccaagcctgagctggttcaggtccgatggcggggcctgcccttatgaatcattcatgatctggccccgcccatacgcgaacgacgcgcgcgttcacgccggagagggggcgcggctcgcccccgggctgagtcgggcggccaggaagcgggactctgcgcaggcgccaagctccggagcgcggccttggtgccttttctggtttggcaggcgcgcgcgcgcgggagggcggcaacctcggcgctgtgcgcaggcgcggcgggcagtgcgcaggcgcgggcggagggcgggctgaagcagctgaagcggcggtagcggcggcggctcgggcagaggggcgggagctgaggcgggagcggacaggctggtgggcgagcgagaggcggcggaatggtggactaccacgcggcgaaccagtcgtaccagtacggccccagcagcgcgggcaatggcgctggcggcgggggcagcatgggcgactacatggcccaggaggacgactgggaccgggacctgctgctggacccggcctgggagaagcagcagcgcaaggtgcgcggcccgcgggccggacgggctggaggggcttttctgagggggcccggggaggggtgggaggtcctgaaaggtaactggagcgtctgtgatgggaacgggggggtcccgagaaggaattggcgggtccgggaagggaattggagtcctgaggaggaatcgccgagctagaggaaggaattgggaatctgaaaagagaattggcggctgggtggggaatatgggagtcaaataaaaggaatcgggaaggctgatgaaggatttggagggtctgggcgtgccattaggggaaaccgaggagatgactgggcaggctgaaatggaactgggatccgaggcgggcttgaagggtcggagcatgggttgggggtgctgggaggagaatcaggggaggctgagaagggaatttctgggtctgggaagtgtgaggaggagcttgagtgtggaggggttggttatttggagagcagaaagatctgaaggagattggaattgggggagcctcaggttgggggagttataaaggggatgaagaatcaagtgtgaggatggagtggagattgtggggtctgaagacgggtgggaagactagggaggctgggaagatgaaaacaggggctaagggtagaattgagcatgaaaagacatgggcttagggtgtgaggagggtagaggtgccaggactgggggtctgaggagggtggggtgcggaaggaagaagttaaggggcccgtgaatcagacgtttttgaagggggtgagatttatttgtggtgccctgttccaaaggggagaagattaagagataggaggaataataagaggaattgatgagggatggagaagccgaagtagaggggatacggagagtggggataatttggggagggatttctaaagaattgatgggaagctgaaaagctaaagcgttggagagaatgaggaagtgtagagggagaaggtgagatcggtgggagggagggtgagctggaatggtggataatgggagagaggttcgtttaggaaaatgaaagtctcattagaaagggaatgcgtaatggatagactgagaaaggaatttgaggagggggtgctggctcctggaggtgcagtcccgggactggagagcgtgtgtgtgtcgtgcaggcagaatgagtttggggaggaagcgttgagagtgtccaggaagaattgtgtcttttttggagagaccggaggtaggtgaagggatcctgaagcagagactgtgttcaggtggcactgtttttttggggggcggggggggcaacttggtagggccccacagcagtgaaaaggtgatcagaagtggagtgggatccccgagcgaggtgtcagtgtctgtgggggggggataaatccagtgtggttgaggggggagctctgagtgtgtgcaggaagagctaaagaaaggagcgtggtgagtgggtgtgtgtggggggaaggggttgttcagaagttttgtgcgtgaaatgggtgggaggtacttgaagttggaagcatttcgtgggatctggagatctggattttctttccagatttgttactgattcgctctgtggccttggacaagacccttgaactctccgggcagttttgttatctgcaaaatgcaaagggatccgagggttccctgcggtgattctgttaataaagagggatgtgtgtagagttgggactttggacagggctctgaaggtttgggagagtgagtttggtggagatttttcaggaacaggctacagggctttgagtggtgacctggcagagtggggagtgactggaagcctctcgagggcgcgagttggtggccaggagcttggcacaggcagcctagcccaggctggaggggaaagggtgggaagggtggaaggagcagctgttccaaggcagcctgaggtggggccgggcataaccttgggtccattaccagcgttgcttgaatttcctcatccgtagtaactgaggggcatggcagtggcttggtgggaggggtgtccttatccgtggccccacctactgcaggatggacaggttgcgatagttggcataaattcactttttgaggggaaggtgagatctgttctggagtctcaacaataatttattgcctgaggcagtgccaggttggaaaaggttgccaagagacctggaaagttgggagggagcaggggccacagtggtggttttgagaatgtctaggctttgtcttctgcagctgaaggtgctggagaaaataaacccctcccccttttttctcaggtgataagggtggggggaccttccttttctctcccttcctgtcttctgccactcctcaagtgactccttttgcgagccgggtttcactccctcccgagagttagggtgtgggctttgttcgtggttatagtgtcccttgcctacagggtgaggctggggcaccattcaggccctgggtggaaaccaggactccccagaacctccaggccttgctgccatgtgtcattctcttacctcccagctcccttcctctggggccgggcaggtttgagggaaaagggtggctcacagagtccgctaataccatctgctttcgtgtctcagccagagccagattctagtacctcctgctttacacctcctccagcaaatatttacccttagctgctctgtgggggaaactactgcttcacctctgtgccctttcctgttatggggtagggattctttttgaaatgggggaaggagtaatggaaaggaatacaccaatctgtgtggctctctaccttcctactaagaaacatccctgcactcccaggctggctgggttgtttgtttgtttgtttgtttgtttttggagacggagttttgctcttgttgcccgggcgtgatcttggctcaccgcaacctccgtctcccgggttcaagcgattctcctgcctcagcctcccgagtagctgggaatacgggcatgcgccaccacgcctggctttttgtatttttagtagagacggggtttctccatgttggtcgggctggtctcaaactcccgaccccaggagatccgcccgcctcggtctcccaaagtgctgggattacaggagtgagccactgcacccagactggctgggttttttctacattgcagtgttgctttagtgaatgacagattgcccttcttgcctctccaaggctgagccactgggcacgggaagaatgacagtcctgggggttctgtacatgcatactccaaaaaaatatgcatccagaacagctgtaggccctcaaagtgggtagaattgaattcttctaggaattaagcaagagttggcccaaatcagaggggacgtgtgtctcacttctgcttggaagccctttgctctgacttctagggacccctgtaacccgtaagtaggttatgcaacggtttttacatgagagggccatgagtgttctcctggcgggatggagaagcattgttctggtctttgagcaaattcttgagcaattacagttctgggccacagttccctctcccaatttctaaaagtggcctgggtaacctcatcaccctctgttgtcctggaagggtgagatctcttgaaggttatgccaaatctcattacagcaagaagaaatgactcacttgctaagttttcgtgttcattgaaacatcactatttcaggggcctcaatgtttcaaccctgaccgttggctttttttttggagacggagttttgctcttgttgcccatgtggctgtattaggtatgagttaactatttgaaagtttttgtttgttttttgtatttgttttttttgttttgttttgttttgttttttttgagacagagcctcactctgtcaccaggctggagtgcagtggtgtgatcttggctcaccacaacctcttccaggttcaaggaattctcctgcctcagcctcctgagtagctgggactacaggcgtgtgctaccgtgcctggctaatttttgtgtttttagtagagacagagagtttcaccatgttggccaggctggtctgaaactcctgaccccaagtgatccgcctgcctcggcctcccaaagtgctgggattacaggcgtgagccactgtgccctgccttgtttttcttgaagtagatctttttttctttttaaaggctgataatggaggccccaaagtagccatctgttactttgttccattactctaattgcttgcctcttaggatctggctaggactaacagttttcaaaattgagtaacacacttgacaaaaaaaaaggaaccaaactcaaactcaactgttatctagaaaaaagactgtgtaaatatgtgtgagaggcaagtatactctgtttgccctcttgtaagagggataggggaggccactcagctgctagcactctgttctctcccctcatcctctccagaatgtattttagaacttgactcttctaatgactgaagaaaaggtggggtatgggaagatggcctgggactgcagggtcacttacactcacctggctaagagttgagatctggctggtgccctggagtggcacctgccactcacctaatcctaaacaatccagggtgtgggcccaggattgccctctgccttttgaaacaccctccctggttccggcttctaagaccaacagggaggctactttggtggcagggagctgactcaccctccagttggaactggtgctaaaagcctccatttaacggcagccgactgcttggccccaagtgggctgccttgtgggggggaaagttcagtggaaagtgttggaggaagcagggtggtgtgtgaatatccaagtagtgctggtgctattaagctctgacacagtcagggaggtcagttaaaatgtggtcttatggccgggcgcagtggctcgcgcctgtaatcccagcactttgggaggctgaggtgggcagatcacctgaggtcaggagttcgagaccagcctggccaacatggtgaaaccccgtctctaccaataatacaaaaattaactgggcatggtggcaggtgcctgtaatcccagctacttgggaggctgaggcaggagaatcgcttgaacctgagaggtggaggttgcagtgagccaagatcgcgctactgcactccagcctgagtgacagaacaagactccatctcaaaaaaaaaaaaaaaaatcagatgacagaggggagcggggacaagttttaagtctaagcctcctgggtggggagttctgctgtttcaacatatgctccagtcatggcagactttggccagacagcgccctttttcagagtgaactgagtgtagcacaagttatctgccagtgctagttagcaaacagaatggagccaaaaaagaattgatttgggaaggcccaaggaatttgaaaccgttgagatgaacactttccgtttttgctacactgatttatgttgtgctgggaattgtacaagcctttgaccagaccttagggttgttctttaaaaaaaaaaaaaaaagattcccttgctgctgcttttacttttttgaagggcagaagggaagggcaaatataattagtgaacagctgtttgctctagtatcacttgctcgttcaggttttctgaatagctgaaatatcaacatgtttatctcttcccttgccttagtatatcctagagcagtgttttccccggctttatctttattccttcatttaatgaactccgtgttttcatcactcacattttgttcccttccctcagtttccttcctttgccttcatttatgtatttagtttacagaataacaaaagcactcgtgttacttttaaacaaggtaaaacttaaacagttttttcctccgtttctttttttatggaaataagaggcaagtgatagcaagtgggtaattcaatggcagtggtaactgaagcactgacctgttacaagagagacggaagcttctacttgagcagatacaaatactgtcatccgtggagatttgaaagaagtctttctatcactgggtagtttgagagctcattagtcttctttagaatgggtttaaacttggaaacatcaaagcaagttacaaggaaacttagttttacagtgttggcagcctaggcgccagaatttgttataaagtgtctgaaagtggcccaggtatcacttaacttttcttcaagaaggtctatgagttacattttactcggtatcccaggcatcaaggagtgtaactttcaatgaatcaaagagaaacagaatcattttaaattccagcctctgtttaaagaaggatcttatgaaggggagaaattaaccacctgacccagggaaggatcccgcctcctccagaaagtgaaatcgccgggtgtggtggctcacgcctgtaatcccagcactttgggaggtcgaggtaggtggatcacgtgaggtcaggacttcaagaccagcctggcgaacatggtgaaaccccatctctactaaaatgcaaaaaattagccgggcacggtggtgcacccctgtaatcccagctactggggaggctgaggcaggataatcactcaaacctggaaggtggaggttgcagtcagctgagatcacgccactgcactccagcctggacgacagagtaaggctccgtctcaaaaaaaaaaaaaaaagaaaaagaaaaggagttaaatctttgcatatatttaactggcaagagcatccttacatcagtgcatgggaagttttatccaagtagcagtttccctgggattataaaaatccccgaggcatttgtcttggtgttgtgcctttttttggttgtgttttttcacgtccctcccctcccctttctccataaacaagagaggcattaacttggaatgtccgtggaaagtcttagaagctgattggtgtaatttgcctgccttccctttagtttgaacagcgtttactctggaagaggtcagtggcctttttcttggttgtgatttatgcaagtgttatctgaaggcgagtggagtgagtttacgtgggatttgctgtttgccacctgttgttgtgctggctccttccttcctgggatgagttccattctctccccctcccccaggagtgaggctccccagccagagcagtccccctgtgcttatccccttccttcgtaaactgcagccatttgtgattttccataaccacttttatagacacataataatttcctttgaatcagtttgcattttaaattaagttttgaaaggaaaactgacaagagtatggcaactggaaaacccagctcccctggccataaatataatagaaggaaactgcaaaaataaacacattgaaaacaaaacagtgttgtttccaggtggttaccactcgggctgaaggccccccaggcttgaggcctgctccctttgttagaaagggattggcaagtgttggtgaggtgttaaagacccaccagcaccaagcagagactttctctttgaagtcatcaggtttacaagagaatcaaaggaaataactttctcaatgtgattcagggtgtaatgtaaggtgtagataacccttaaaattttccatgtgtgtatgtcacacttgggaaaaaaacttgatctcatctggtcgaggtgggcagggcagcaccttgtccaggagcacacagcccctcttggctctgtgtgtcatccggccatactagactcgaacatatggctcatgactggatgatgcttgattcatcttcagtttcaagtgttagtgcttttgaggttttgtaagaaaccaggacacattgaaaatacagtcatttctcagtatctgtgggggattggttccaggaacccccttatataccaaaatccacagatgctcaagttccttatgtaagataaaacgatgtgtaatttgcattttaactatgcacatcctcctgaatactttaaatcatctctagattacttataacctaatgctaaatgctacgtaaatggttgttacactgtgctgtttaggaaataatgacaaaaatatgtacatgttcagtgcagatgcaaccattcattttttttcttccagtattttcgatccattgttggttgaattcacagatagagaacccatggatacagagggctagctgtaagaaatgtgggtttatcatttgttcctcacacaacttttttctttcttcgtttttcttgcctttgttccttttttttgagacagggtgtcactctttttaccaaggctggagtgcagtggaacaatcttggctcactgaagctttgacctcgggctcaagccatccccccacctcagcttcccaagtagctgggactagaggtgcacaccaccacgcctgactgatttttgtgtttttgtagagatggggttttgctgtgttgcccagtctggtctcagcctcccaaagtcttgggattacaggtgtgagtcaccacgcccagccaactttttctcttaaggctccagttttcttcttagagttgggcccctcccacgaagaaagcacactgccaccccttcatcggatttgaaccctacattttgaaaggaaagcagtgccctcctgctgagttaacaaggcttatttaaatgtttttcttccaaatatcagagcagaacagattctttgtcttccagtggaactatccacatggggcagaagtagttggaagcggcagttactaccctgcagaacacaatgaagtcatcttgggaaatatcgtggatggtgttgcaatgattgaatgggatgctagaacaccagcaatacaatagcatttgtgtcttcagcttcaggcaggaataaagaagactttgtggtttgttttatgttttttaaagtttcccccccaaaggtgtggggctgagtgatgtctgtcactagctttctagtgggtttttcttttcatcttttcccctccctgatgtcttttgagagtgggtggaagccacagtctaggtggatcagaggaagcacagaaggcaggcagtataccccactttgtgttttccatgtctgaagggaacacatttggtttttgttctgttttgattttttagagacagggtttcactgtcacccaggctggagtgcagtggcctaatcataactcactgcagccttgaactcttgggctcaagggatctttcagcctcagcctccctagtagctgggattatgtgtgcaccaccatggccagctaattttaattttttttttttttgagatggagtctcactctgtcacccaggctggagtgcagtagcacgatctcagctcactgcaacctctgcctccccggttcaagtgattctcctgcctcagcttcccaagtagctgggattacaggcgcgcgccacgacgcccagctaatttttgtatttttagtagagacagggtttcaccatgttggccaggctggtcttgagctcctgaccttaagcgatccacccaccttggcccaacaaagtgctggggttacaggcatgagccactgtgcccgaactaatttttaaattttttgtaaagactgggtctcactatgttgcccaggcttttaatctgcaaaaagcccaagataaagagttttaatatcttacctcctgagtagtaatgactgattccagttctaataatgtcttaattacagctatacagattgaggggactgcaggaagtgaaatagatgcatttcttttttctttctttcttttccttttttaaatacacacttcgtttcggtggtgaaggccagtttgaggttaggagaggcatcttggaaggaagctcgcaggtggttcggcatctggacatgctgggaagttgcctgagggggacgtcacaataagaggactgtgggtctacagcctgccttagcaaaatgacaggccttcttttaccaaggccaagggcagtggtggaagctgacttcagttggtgtcatcaaggcctcagtatgtgtaacggttaacaaattactattctatgatcaatctccatctgggtgtgagtaaaaggtatttagttgctatcaccatggaaaccaagttgcttacttactgttttggggagtgccctcataccagaggcagtgctaatggtggagtgttaggccccgggcagaaaaaaagatcctgccacttggtatcacaggaaaatacctacaggcacagcagccttgccaggtaggggatgaaggccctctgtcctcggggcaggagttgggccagttgattgtgttgatgaggagtgtgcatttgtgcatgagagagggagaagaaaaaggagagcactccatgaaatccgctgctggctttgtagcctagaagagtgctttttttctctaggagtttggaactggaatctcagctatgtgacttcttaataataggacaaaatatgcctgtatcttttgcctacttccacaaacactgataaattaaaaagaactctaaatttcccacaaatcccaagcacaagtaactttttttttaaatccacatcctccctaatccaaatctaacagcaaatccttttctctctgtcactccctgcttttctttaagaaaatgagtaccttgccttaaactatatattggatgaaaatattaaacactttcacaaagtgcttctttggctgttactggtatgccttgcatttggaagggtcagagatttgaagacttctgtgatcttccagttctggcctatgaaatacagtcagtttcaaaattcaaaatgtctggaagagccaacttgccaggccggttcaagggcagtcagatgaatcgacccttcttacaggctgtctacgaaccagtcatgattcagatattcaagtcctggaaggtatccagacggtaaacatcaccaggattgtgaggcagttacttttttttttggatcgtttgagctacactgccaagactgtggtaggacttgtctgtgtaaaacagaaagggctgtctctaaatgtctttttcaagaatgtcggctataatcacccgacactgtgtctcatggtggggtgagatgaaatacctagaccggttaggggagggccttcttggccattttttgaactaattttccctttccctttgtaacttttttttcttcttttcttttctttttttttttttgagacggagtcttactctgtcacccaggctggagtgtagtggtgcaatctcggctcattgcaacctccgcatcctgggttcaagtgattctcctgccttaggctcccgagtagctgggactacaggcatgcattccacgcccagctagttttggtattttttaggagagacggagtttcaccatgttggccaggctggtcttgaacccttgacctcgtaatgcccacctaggcctcccaaagtgctgggattacaggtatgagccaccgcgcccagcccctttgtaactttcattaacactgatgaggcacaagccataggatagaattgaatccattgagagctgtgagccaattgagggatgattggttaatagattgtggcttgaagctgtggaaggtaaggggtgacacttgactcctattagccttgtagaaacacctcagagattcacaggaagcaaactttgaccataaaaatataagactcacagcgcaccgagttctcttagcagctaccttagagttgagaaagttttgggcctctttaataaacaagcacaaagcagttcttgccaaatacggcctgctctggggccacagggttagcttaggagacaactttcttgcctaaaaataaatgcatgttcctatcagacattccaagcatagtttaaacatgagacttctgagcagcagctcaagctctgtgggttcaattatgtcagagtatgggcagtgagggtctttggggagtgtgcccccttatttgggattggttgtggctaccaaggaaatcagatgatcaaatgcaaaacttcctccatcttatttctatatgatcttttttttttttttttgagttggagtcttgctctgttgcccaggctggagtgcagtggcaggatctcagctcactgcagcctctgtctcccagattcaagctattattctcctgcctcagccttccaaatagctgggactacaggcgtggccatcatgtccggctaatttttgtatttttagtagagacagggttttgccatgttggccaggctggtctccaactcctgacctcaggtcatccacccgctttggcctcccagagtgctgggattacaggcatgggccaccgcccccagccttatttctacacgttcttgatctatcacaggctggtgggggagacagcatgcatatagataatgaacaaggtaacttcagataggattatgtgcaataaattaaataacagctagcattttaccttgtgctagacactattctaagtgcttcccatggactgactggtttttgtttttttttctttcctttgagactgagtttcgctcttgttgcccaggctggagtgcaatggcgtgttcttggctcactgcaacctccgtctcctgggttcaagcaattctcctgcctcagcctcccgagtagctgggattacaggcacgtgccaccatgcctggctaatttttgtatttttagtagagacggggtttctccttgttggtcaggctggccttgaactcccaacctcaggtgacccacccgcctcagccaccccaagtgctgggattacaggcgcgagccaccatgcccgacccatggactcacttgtataatcttgtgaagcaggtgttgttacccttacatgcagaaatggatccatgggcctttaagccacttgcccctgtgacagtgccaggatttgaatgtagaagttgaggctttcaagtttatgctgttatttctacactacactgaagtctagtgattgggaatggctttgcgagcgggtggtgaggggaggagtgtgcagtgcaggtacttcagatggagaggaaggtctcaaagaggtggcatttcagctgttccttaacggatgagaaagagagaaccaagagagcaccagaggaacgcgcttccaacagagaaaaccaagcaagggggcccccgaggagcagaaaggcccgagtggtcagagcggagcccgtggaagagatgggcacagccagattgcttagagctgtgttgttagaagtgctgatgagtctacattcaacttgcgcctgcaaactcagtccctcttagatgccagtaggtcaggaacctcatgcttccaggactctggcgctcctaccctttcctcccaggcctcctggacaggccaaaccagaactgacttctaaagtgggaaccccaagacggcagaacatgaatcagccaaacaaaagctgcagttatctctgtgatgatttcggcagtcggcacgtgtatttgattaaagcgttggtaactttgaatctggagttttatggcactgtgtactactcataatggctttgtagtgtggctctcttagggagcttaacttttacaacatgaacaagttccagcctcctttggtcccatcaagaggccatttctacctggtgggatgccacttgctttacaaagcatcttttgtaaaatgttgagtctccttctttgaagttggaagccaggaagcctgattttttttccaataagtattgtagaagatggcagcctgatttatttttatttatttatttattttgagacggagtctcactctgttgcccaggctggagtgcagtggcacaatctcggctcactgcaagctccacctcccaggttcacgccattctcctgcctcagcctcccgagtagctgggactacaggcgcccgccaccatgcccggctaattttttgtattttttgtagagacggggtttcaccgtgttaaccaggatggtcttgatctcctgacctcgttatccgcccgcctcggcttcccaaagtgctgggattacaggcgtgagccaccgcgcccggcctggcagcctgatttttaaactggcttttctcctaggtcctttccttctctataaatccctctttcacttagtatttcctccttgtttcctttggtcagttggagtgagggtggttctagttcagagaaagagacaggcatacaggctgattcagtctgaggtgcttagctttctgtacctcactggaaaccagtccaggaatatgacaggtttcagtaggtttcattggacccacaactccccatttgaaggcagagcttgtcaaacgagttatgtggcttttactcaaggagggaggaacagcaacagggagctctgggctattgatagacactcctgcctctgaacacacagcacccagcaagaagttaccttcatgggttgtctagagtgaacatgggctgggattctctcagccttagcactgatgatttgacaacaaaaatcgccccgtgggtagagtataacggagcaaatgattatggtggcctgtgatggtgcagccagcccagctgcttcagctggaaagaagatggcgaggtttccattctcctggcagcatagccatgtgaacttgttaaatcttttaagtagctgtataggaggggagataagtgtgtgtgtgtttattcttatccccttaaatacaaaaacaaaacttccactttataaaatcaattcagagtgggaagaggtgcatggcacatggaaaatgtgtcggattaggttgagtcctaccccacgtttgggacacagctgtaagtttccatggtgggtggcttattatgcatttatgctgagctgaacctgctccaagctgctgcagataggaaagtctgtcttggagggggagctgcctctttctatcacactataaagacataaaaggtcctttgaaagactccagcagtcaccacttgggtaacagaattaggggctgctgagcaaagtgggtctgtttttttttttttttaaagacagagtttccctcttgttgttcaggagtggagtgcaatgtcacaatcttggctcactgcaacttccgcctcctgggttcaagtgattcttctgcttcagcctcccaagtagctgggattacaggtgccggccaccacgcctagctagttttttgtatttttagtagagacggggtttcatcatgttggccgggctggttgtgaactgctgacctcaggtgatccacccgcctcagcctcccaaagtgctgggattacgggtgtgagccactgcgcccggccacattttatagccaaccggcttcttgtgtaacatgagttggggcttcttgggccccagagtccagcactcaggtagaaatatgaccgccatggccagacagcagccctcgctgggcccctcttcagagcagagctctgtgccgagcctttaggggtatgagagaaaccggagacctggtccgtgctctcaaagagctcgcggtgtagctggggagagagcaaggccacatgagacctcagaaggacactaaacggcacaccgacaagctcacagcactctagctgtgtcccgggagaggaaaggggtgaatcagggcaggtggggtcagtcatggaaactttcataaaggaggtgagtgtgcaggaggggcgggcctttgcccccgctgcgggcaggttgccgagggcaagtattagggggtccggcgtgcaatcgaacatttcttagctgcctctttggagtagcgctaccagttcctgtccccatgagcatcgtcttcggggagctgctggtttgaaggatgaggtaccatgctcatcttggccatgtcttagaacctgtgatagccagacctgtcgttctgggtccgtatccattcatgcgtcctgtcactgtcacagatatcgtgagtgggccagactcttctccccaggtgggagggggtgccttctgaggcatatgttttcagcctgctgatggcctcttcagaattagcacaggtttcgacaaaaagaatggagagactcccttctcatgtccaagggtctccccaagccctgtgtctcagcccctcagggcgtgtggtgctgcacactgccgcccagatgaccacgcgcagccggaacggccgccctgtattgagaagtgggatcggctcccagtctgctggcgaggctgggttgccacagctcctctgttgccctgcaacgcgggtggcctaggagtgtgctgccttcagtttattcctgcctgccaagctacgcttccaggtgctattcttttctttaaataactgccttagtgctgcttgtggaacttagcgttcccatcccaggaaatactccagtgttgtgtttttttttttaaactcattcagatgctcatggccaaatgtgtgacttaaataccgcagtgtccttgatattgccttccccacaccgacaaaccgagttgcattctggtcccactgtgggataaggttagggtagcggcgcttgcctctttgtgtggtttcagatgtgtttctccccacttcagataacacatgacagctgtaatatagctcagttcgtgcaagtaaggtaggggcagaaatcatccaggagaactccagcctccatcctaaaggattagactgcctagcatcagtaggtttaccatagaaggattcagtggagatagcgagggtggtgagtgttgctggattgagcccgtccctgcagcctgggcacgggagcactgcagtgccatgaaggagagggctgggggatattagcacagccggttcctatttccttttccacctggttaagacttccggggaggccctgcccagcagtccttatgagatgctgccttcctcttttttgaaaggcatagatgataaggaggtggacatgttttgagaagagaacctagagctcattacttgtatttgaggcatgtattgcttcactcccactttgggagagttttttctggggaagttaaaggctattcaggatcagagagtttcctgcatggtcccaggggctgggaggagccacctgctcagctggtggttagctgatagcacccagcctacccaccaagataggaggcagctcagatgtcactgggattcgcagtaccacaggctgtccctgggcccaagcagttagctagctgcaccccgggagggggtgttgagagcactgaagctcctgtgggagagtgcctttgacatcccccactccccactgcccagaactaggaggtagtgaaaggtgtcagtggcaagaaggctgggccagagcatggagggaggccgacctgggctccacacccacctcctccaccaccggctggctgtgcgaccctgggcaggtggcgggggttaagcctcagtgtccttctttgaaaaggggcatcatcctatcctcagtttgaggattagacgtgatagtgcgcaggaagcactctggtgcctggtacattgtaagtgctcaataaatgcagcttcccaaaatgatttcaatggcacatggtcctgcatccaggtgggatctgctacttgagtctccccctcaaaggggcctgctgaaatacgcagctcagtgggaaaccaaaacatacacccctttcctccagtgctccccaggaagcgccaagtcctgagcccagccagcaacttcgaagaagtgccctccaacaagtggcagtgggcacttgagcaagtgacttaacgcagccctctccccagcccctgcatccatctgggcctcattatctgggaggtggcttcttgtttcagagttacaggccctgaacaattttgtgttgggatgtgccataggcagtgccaggaaggttctttcatgagtaatttaacttgttactaagtttgctatcagccggggggctctttccccgggttcccttctttccctgggtccccttccccgcaaagcaaagtccaactcaagttagaaacatcccacagcctggagtcaggctgccctctcttcagttggtgtgtgatgtagaagcaggaagggcttcccactgataaccctaaaaataactgcccagaaatgctgtcagatggggccaagaggtgcacaggagcctgtgcccagctgccgacctggaacgtgggactttctagagggcttggaggagccctgccccttccaggcctcttcccaacagtgcttctcacgcctgctgctccattcccttttcctccttcctcccgcgcccccccctttcctggggtcacttcctgatgccattcttcaacttcgcccctgtcccccccaaaagcaatcaaatccacaacctaataaggcaaaagaatgaggagaatgtccgcctcccagcctctcccctaacagggtgcaggcctgaagcaaatttggaaaatgttacaacggagtgacaaccgatgggggctgggggtggggcggtgcagccttgttcaggagctgcccattgttggcctgaggcaggaccctaagggaaggccacccggtttgcgctttcctgatcaggctgttgacacccttctagcacaagaaaatgtatggaaagtaactgcctgagtcagctgcatctccagttgtgggatccacgtgccaggagaacacgaagtacacacaggtccgcagtgggagcccgctcggagacacctccccgccatcacggctgggactgtgcatatccaaacacttcttgcctctgagatgagcagttttcttccccttgactgtgccagggttcaattagcctgggcattaattaaaacttgtcaacacttagagtggggcccccagaaatctgtcacccctcctagatcattatcccaggctaatcaaccctctctaaggcagtttccattcttgacttagtgggagggaggaacaagcccctcggtgctggggagctctgggggaggtagggactgactgggcccaacccactttgttttggaaggtcaagcttagtaattaacctgaatgcttgggggagggggtgaaggagaaagaactgagtctagggatgtgccaggtctttcaaattgctaattatcagcgagcatgaggtcatccgtaaatatatctaattctttagcttgtaattaaggtgctcattaaaagtgcagggaagtcttgttttcctaaaaggggaaaaaaacaacaacacaaaaagtctttgttttgacctgacacgatggctcagaacagggggaggactcaaggcacaggactagtttcctgccttaaagagcctttacaggaaattgactgcaaacagtattggtgaccctgccaaggaggcaaacctagggtgatgtcattgttcgaagctgtcaccgccaagcctctggccttggggcgaggagagttggtgggattaaaaaatgagtgtgtgtatgtgtgtgtgtgtttagcagtctctaaagaggcgagtcaagggaaaatcctagcgggagaaaaatcacaaggggtggggggtgtctcagaaatattcttagctgggttcaactttcctcgtttttctaagtttaaaaaatcctctcttactatttttgctcatcaaaatgctgctgctttttcagagacagccttttttgagccattccctatttagtgttttgggtaattggctgttacagtatggaatttgtggcccaaaggcagcgtggtaagttagacactaggtgcacggtgccccattgttatgaagtgtggaaactgagacgctggactagtctgatgtatctgtttcttccaccaaaaaaaaaaaaaaaccattttggagaactacccaatgccagtgacttggcatctctgagtcgctaatcttcccatgtgcctccaggaaccgtctggagcgtccctgaaaaaaggacaaggtttgtatcttgtcatttttcctctggctggaagtctaagaggtataaacacagtcttaaaatgaaagcaacaaaaataaactcaaagcagccctgcgtgaaggcattaatgcaaaatatgcaagctggcttcctatttatacggcggaaggcagtcagaagagccaggcctggttaaggaaggagttatgtctctggaggtgcctgttccttagaattacaaataaaccctgggtgattactcagatgaggttgtaatgtggtgtctcatttcatgctttgcacagtccagtttcttgatggaaccaacggcctctgaaatgctaatgcaggatcaggatacagttagagtgccccccttcctgtgcccctcctaacatcctaacagctttagaaggaagtttgaagattaaacaggagagccatgtaagtttcctgtgatcctagatcctgtgatttgttaatattctttctcttcaatccacctgacatttacccagataccatattaggcttggagatacaacaagaaagaaaaccaacccaaccctgtccttaaagaaaagatggacgatgaagggccaggcgcagtggctcactcctgtaatcccagcactttgggaggccaaggcgcacagatcacgaggtcgggagtttgagaccatcctggccaacatggtgataccccgtctctactaaaatacaaaacattagctgggcatggtggtgcgcgcctgtagtcccagctactcaggaggctgaggcaggggaattgcttgaacctgagaggcggaggttgcagtgagccgaggtcgtgccactgcactccagcctggcaagagagtgagactccatcgcaaaaaaagaaaaaagaaaaaaagaaaagatggacaatgaattgcatgatggaagtgaacagtgttagggcgatatgcagatgtaaatgtggtcttgttttactgctcactgacttactgaagtaaacccattgacttcgccttcatgggtttgaaaagggtttttccaatgtgctctgtgtgtctcggagctcaggtgttcagagctgcctcccttataaatcgacctccaggagagttgtgtgtttggttcttggtgtatggtttcgtaggctccccagggctgaggagtcaccttgggatccagctttttttcttttttcgagacagtctctccctgtcgcccaggctgaaatgcagtggtatgcacttggctcactgcaacctctgtctcctgggttcaagcgattctcctacctcagcctcccaactagctgggattacagacgcctgccaccgtgcccagctaatttttgtatttttagtagagacggggtttcaccatgttggccagattggtctcgaattcctgacctcaggtgatccactgccttggcctcccaaagtgctgggattacaggcgtgagtcaccgcgcccagccaaaatccagctttttcttagttcctggcttggggcatgttgctggaaaggaatgacagattgaggcaagaaggaggcaagaaggatgcatctcctggccaaggaaactagagtttggaggtgtcccctgtcaatggcatctgaagaatttctacattggaaaggcataggtgacccagtctggtttggagtagatgggactgggtaggggactagtcttgaagctgcaagcatgctgtttttacttagagcacaggtagctggggaggagatcactgtggtgtgggtggcagaagccatccctagccatcacctaggaagatggtggcccttgggttgcccgagctgctgcttgttttagtagctgcatttggtgccacatttttgtggtaactgccaggaagcggagcccagcgtggcctcaggaagttggtgaggtttgcaccactttttaacaggctggtaacagtgccggagctgacaccctcatggttgcagccctgggattttgttatttggggacactttggaatatgtcactcagaatgctggctcactagctccacaagcaaaagactccttgggtagctggaagcaagcgttgggggaaggagggagaggcaattgcagtccagccaagaatctcaaggctcagtcttcaatgtatggaaacttcagtccttttctgatctttagtggaaatagctgttcactcttagcgccaattggaaagtgttggcagctgaagggggtcgttcctcaggggtccccagagccagtgtatctggtatttctaacattttcctagccacccctttctcctccatatgcccctcccagccccaccattcagatagggtggctggaaagaacatctcctaggtcctctaggaaacttggtgtttccactcaagggagttggggatcacgtaacaccctccacttccacctgggatttcaggccatctgtgggagtgcaagagcatggtggggtggaggtcacaggaaggtggaagcaaagccagggcagctccacatgcagccccctttcaggaacagcaaggataggccggcctgtatcttgttgctcagagcaggtgatcctgtcatttggacccttgtgaggagaatggatgtgagtgtgcacctggttctcttctcctggggctgagggactgtggtcttggattatcacatggtaggtgaggtgacaaaatggagggaagtagcctgggtggggactggggtggccactgcagagctctagctgatggtggccaggtgggaatggggacctgggacttcacgaagctggaaatggagagttttatggggcatttcattcaacttaaaaacctggccgggtacagtggctcacgcctgtaatcccagcactttgggaggctgaggagggtggatcacgaggtcaggagattgagaccatcctggccaacatggtgaaaccccatctctactaaaaatacaaaaattagctgagcgtggtggcttgtgcttgtaatcccagctactcgggaggctgaggcaggagaatcccttgaaccagggcgtcggaggttgcagtgagctgagatgtcgccattgcactccagcctggtgacagagcaatactccaacttaaaaaaaaaaaaaaaaacctgcaggccatacaaaatagggcctattgggtgtgaagagctacccatttgtgacccctaaccttgcatggtcttgaccctgtctctgcctctcctctagtctcccctttcctcttgtctgaattgctgctgcttaatcctctcactaggagcgagaaaattgtactttgccccttagtgacagctctgataaaaggtggttgaagtggatggtagtaaaaagggtttgctttagctgtggttttccagcctccggactcctccccctttcccatcaccatagataattaagagttgactcctcaaaattcctcccaccatattgcatatttttaggcttcaggtttttgtgaaccaaaatagtggaaagtttttttgtttgtttgttttgggtagcccaaagcaacacttttctacagaggcagccattctgcacgcacaataacctggtgaacaatgccagctttctattaataaatgaactgccagttcagaatttgtacccatgtggcagatggacagaaatagtttctttaggattgatctcttaaatttgactttgggaagatactggcagtccaggttttgtgacagagatccatcctgagatctttgtaaatggaaaagcctgaatgcagcgtttcttattgataggagagttgatggatttcaggaaaatgggatatagtagatgtgcaatgaatttgttgacttggaaacaaatttggacacttatccctgaaaacttcaggccattttttcctaaactctaattgagtccctgtgattggagtactagccccacagtccttatcaaacttcgcatttggagcaggcagtctgtctgggaaaagccaggaagctcgccatgaaggcatcgccctctgcttttaacttttttaggctctgttacctctgcactggcttgagtatttcctggctcaattgtttctcaggctggccttgagtccttagatgttatttgtgtgcctagaaatagctggaagaaaaatggttgtaatgctttgcattgctcactgctctccatggatggaaattctgtgagggaaagagggctttccacccagaaaaagagctgggcagcgtagacttcattgtcctgctggcctgtcatgttattctgctatactacagcgattaggatgagagagtttctcgctctccctgggtgtgccacctaaggtacattagggtagggacgaacatggcgggagttctcatagtgggctttcctgccagacgtatggcccacacagcagtatttcttacatgtggttcttttttttttttttttttttgagacggagtctttctctgtcgcctaggctggagtacagtggcgtgatatcggcttactgcaacctccacctcccaggttcaagcaattctcctgcctcagcctcctgagtagctgggaccacagatgcatgccaccacacctggctaatttttgtatttttagtagagacgtggtttctccatgttggccaggctggtcttgaactcctgacctcaagtgacccactcgccttggcttcccaaagtgttgggattacaggtgtgagctaccacaccctgccaaggttctattatttgatctatgttctttgtttgtttgtttgtttgttttgagatggagtttcgctcttgttgcccaggctggagtgtaatggcacgatctcggctcaccgcaacctctgtctcccgggttcaagcaattctcctgcctcagcctcctgagtagctgggataacaggcatgtgccaccacacccggctaattttgtatttttagtagagacggggtttctccatgttggtcaggctggtctcaaactcctgaactcaagtgatccacctgccttggcctcccaaagtgttgggattacaggcgtgagccaccatgcccggcccctgtaaccatttttaagtgattgatcatctcagcatgattgatggagatgatggggttggccatccattcttttttttttttttttttggagacagtctcactctgtctccaaggctggagtgcagtggcacaatcttggctcactacaacctctgcctcctgggttcaagcgattcttctgcctcagcttcccaattagctgagattacatgcatgcaccaccatgcctggccagtttttgtgtttttaatagagacagggttttatcatgttggccaggctggtctcaagcccctgacctcaggtgatccccccacctcagcctcccaaagtgctaggattacaggcatgagccaccacacccggcctattcatcatttattgagcatttatttatacccactatgtgccgtaaacaaggtgctgagtaatgagatgtgaacagaatagtccttcttcttgtcctcatggagcacacagcctagtcggggacaataggcattaaaaaataccaacaatgaaaacccaagacatacatagagtgttccaaattgtggttttattttttatatatatatattcatatatatttatatatatttatatatatattcatatatatttatatatatgaatatatatttatatatattcatatatacttatatatatttatatatacttatatatatttatatatattcatatatatttatatatattcatatatattcatttatatttatatatattcatatatatttatatatatttatatatttatatatattatatatatttatatatttatatatattatatatatttatatatttatatatttatatatacttatatatatttatatatttatatatatttttatatatatatatttatatatgtataattttttttttttttttttttgtgatggagtctctatcacccaggctggagtgcagtagcgtgatctcagctcactgcaacctctgcctcccaggttcaagcaattctctgcctcagcctcctgagtagctgggattacaggtgcctgccaccacgtccggctaatttttgtatttttagtagagatgggatttcaccatcttggccaggctggtcttgaactcctgaccttgtgatctacccgcctcggcctcccaaagtgctgggattacaggcgtgagccactgcgcccggtgtgattatttttatgaaggaaaagaccagagtcctttaagaggggacagtgggggacttgcaatagattgtgtgggagctgtcaggggagactttccaagatgatgacagtgaagtgaggcctggagggagagttagagccaacctcagagaagggaacactgttctaggcaggaggacccagggttgtgggaagagagaaataaaatgagaccaagacagtggggagagcagtgtgagttgaagtcagaggggtgacagcagccagaatgtgccggtagcgaggatcttggattttattctagctgcaatgagagctttgattctacaaatatttattgcgtgctagtcactgttttaggtactgggtgtacaacagtgaaaaaagaacttcccagccgagtggaatgccgtggagcatatctgtttcgatgctgggacagatccctaacacagctcattaaagcagatagcaccattccgtctctttcttcagcttcactttacgtcagtcccagcatttttatccctacccttacagatgagagaactaaagttcagagaggtgacgtgacttgccccaggcccctcagtcagtaaaagacagaactgagaatccaaccagactcttccctttttaggttatttctctaacattagggccgagtatcgattctctttacctctgacttcgtgtccctggtattaagactcagggcccacagtgcctcttggaattcaggcatatggtgacatcagtgtgcctaccattcaggtcttggagaatagggtatggcgaaaggagagaactcgtgatatcgctgattcagtagcccagagttgtacgagtccttgggtgtttcaccttcatccaggcatctgagattggagacaagcatgtggctgaatgacgtatctgggggaagctgtctaaacagccgtgtggagttggagagttgaattagctctgtggccaaacctctgggctcagtctgcctatatatggcttgatctcaaagaacaggtgatagcagtaggagttgttttctgtgttgctggtgggagatgcccaggcacattcctttgtagacaagcacaaactagatatttttgaaatcggaggtctgaaaccagccgaagaattaatcctggcctggaaagcatatgggagagtacagccaacctggcttgggtgttgctttcttggttttgttgcatttttgaggcagggtcttgctctgtcacccaagtgggatcacagtggtacaatcatggctcattgcagccttaacctcctgggctcaagtgattctcctgccttattttttgattttttttgtagaggtgaggtctcaccatgttgcccaggctggtcttgagctcctgggctcaagtgatcctccaccttggtctcccaaagtgttaggattacaggcgtgagccgctgcccctggtgactttgttgctttttaataagcccagaaatttctttcaagagggaggatctttgtgaacatcttgagccgcgttcttgatcgctggctgtggaagcctccacctatcaggctcaagtccatgttgctatcatgtgcactttggctggtgaggtgctgagcagaggtttcagcctctaccacaaggtttcctgatgaaaggtcagctgggtgggcccagcttctccttacccaactgagaggcctcatagagcacaaggcctgggtacggaggttcctggggctcctgccatacccagccaggccaagcagagggccccagtgtgttgttgggtgctgagaggctgcccgcagctctcgcctgtgttggaaggctgtagacttggcttctcccaaacgtaagctgtgaagccatggactcagattctcagcctggccctgctacttactgtgggaccttgggcaaggaagtctccattttctcttttacaaaatggggccaataatctgactaccacagggctgtcaggatgcagcgggatggagcctttatagggtcttgttctgtgggatctggagtcccatatgggagttattagttgagggacgaggcatctgggaatctttattcaactaggaaacttcagccaaagaactaatgccatagagatgtcttatggtgtctgcatttgaagccagcggttctttgaaaatttatcctgagttccagaaagccaactgctagataagtaagcattgagcatttaaggggtcctggaagtaagattcctggaaagaagcagcaatctcttactcatccccgattatctcagacacagagtggtggatggaacctttgtggtttaggggctgactcttggtattgctggataaggaatatgagccagtagagacgagtgtgttgtatagcagtgtcctgcgactgggctggagacgtggctgagggaggccagggggcctcagagtgcacgggaggaggcttacagaggtcttttgcatcctgcagaacaccacatgtgtccttccctctgggaaacctcccacccgggcagggcctctggggccggatgtggaaggtaaacaggctgcctttctgctctctaccacagacaggcccggaaaggcctgagtaggagcttttcatctcaggaagccctgaggtcccacagcttctcctgaagcagcctcattgtccctttgtaagagcatgaccaggtgctctagctcctggagcaccagtggagaactagagtggcccaggtgctgatgccaagttcgagcaacagctcctggcgggtttccctgcatccccccactcactcccatctattcttcacataggggccaaagaacatcctgcttgacatcttgatcagtgtcccttgccctcaggatcaaacctgcaagtccccaaggccctgcaggatctgttttctcctctctgtgctccgggcgcatgccagctgcctctctgctccatgctcattcctgcctcctgagggacttcacacggggcccttgcctctgcccctttcgcctcagctcgccacctacctcctcctcattcttcagatggcagtttatgcttcactatttgtagggccgtcgcacctgacacctccagcctaggttaggagcatgtccatcacctctacttctccttttaactccaaccatccttggctctccctctcgagggtcacgagagcagagagagaatctattttgttcaccactgtgtccctaccatgtgggacattgtcaaggcaaatgtaagtgtgcactaaataaatatgtattgaatgaatagatagccaaacagacagaatggatctgccacaacacaaacaggatgcttttcaagtgggcagaagatggagacatcacttgtcgagacactcaaacaagtggctggatggatgagtggcagatccattctgtctttctgcttggctttaggagtagagggatcacccatggtccatcctctgaggacaagggtatcatgaccgcccaggccccactcacccctgccaggctcattgcatcccatctaaaagtgtgctctggaaggtcataagaagtcctcacctgggacacttctaggcccagtgttcagccagctgtcctgagttctgcatcagtccctgctagatatgaaacacaaacaggatgcgatgcttttcttttttttctttttcttttttgagacggagtctcgctgtgttgcccaggctggagtgcagtgggtgcaacccctacctcccgggttgaagtgattctcctgcctcagcctcccaagtagctgggattacaggtgcacaccaccatacccggctaatttttgtatttttggtagagacaatgtttcaccatgttggccaggctggtctcaaactcctggcctcaagtcatctgcctgtctcagcctcccaaagtgctgggattacaggtgtgagccaccgcgcctggccaaacaggatgctttgcaagtaggcagaagagggagacatcactgtcccatggagaggtgggaaaatcatcgttagcacaggataattcatcctattttgtgctcatgtttactgagctaggattgacctgtgtccgggcagcagggacacagaggtgagtaagacaaagagaaggcccttgcccttaaaaatgatacgtgtggctaaaacgctgtagacctttttgttttttcctttttgagacttcctttttatacagaaattgctacctgcaggtaaaattaacttacatcgtgaaagcgacagtaaagtgtttctagggatagctaaagacctaagaacacagccctgtggtttgactggctggccaccttcctgcagctgggtttactatggtgctgtgttctgggacagcccactcgtctccatttattgggctgagcctcgagacctgcaataccagggaaggaagggaagtctaggctgtctttggtggccattgttatttatggggcatcggcagagaagtcagtaccatggaaaatctagagaaagatagaggatacgcagtgtggttgagcagaatctgatagctccctggctctctccgggccatgggacccagggcgacacagccaccctttttctctctgctgtctggcttgggcttgggctttgtctcctgtgtccctccacaccttcttcgctgtcagtggtgaccaatcccgtggaatcagccactgtgtgttaccccaagtccttgcccctgggacctcgctctgttcggagacaaaacccgggactgtttctccttttaaatgcaaccttgttccacaggagaggagaaaagcaagaaagaggtggcttgtttatctgatggtagtggggtgtgctctgatatgcctttgaaaggggcccagctttgctttgcccagcggcctttgcaggataatgagagaaggaaaacacagggaacttagtgggaatttgaaactggagtgtgggagtgggaaagttcagcttttaccttggagcaatccagtctttctcctgtaggaaaacagaatggtgctgtatggcctccaagctgggttacatcctgggaaaaagacacgtgcttggctattggcctgggcgcagtttatgtgtaagcctttccttgtggattccattttcttatttcccgaatacttctcagccccacaagtccactgagtcttctgtctccagagactgcctggtttccatccccgagggcatctgcgcatcacttaccatggtgtaccatgcacctccagtgtgcccggcactgtgtcaggagctggggatacaggtgctggtccccacctcactcccctcaacctctgcaatatatgatacataacccacacacacagaccatatgcaaaagtggtgggactcctttgtacctgtcacctgcatcagtgattatcagcattttgccagacttgtttcatcagtgtctcccaacacactccccccagacattacccatacgtgctcaaatagatttgggtgtgcgtgtgtgtgtgtgtgtgtgtgtgtgtgtgtgtatttttttagagacagggtctcgccctgtcacccaggctggagtacagtggtgagatcatagctcactgcggcctctgaactcctgggcttgctttgttgcccaggctggtctcagaactcctggcctcaagcgattctgccaccttagcctcccaaaatgctgggattacaagtgtgagccaccgcacccggccaatgtatgtatttttaaacataaccacatactgttatatttaatgcttctgaccatgtcttaagaaaaaaacaaaaactccctttggcttccttgacatcacagtctctctgtttctctgactcttcttcctcatctcctatggctaaattctctccctctgtccactgcttacacatgggcatttcacaatgtcctttttccctgaaggaacttaccccctcccctcagccttaagtaccccatctgtggggatgatgcccatgcctgtagtcctgactcactcaccacgctctatcgcagttatttactgatgcatctctctcccctatcagacgctgaggtctttgatggagcaaccttgtatttgtccgtgtatccccagcaccacacctgtccatagctggagctcaggaagtttttttttttttttttttttttttttttttttaaagtcagagtctcactcagtcgcccaggctagagtgcagtggcacaatcttggctcactgcaacctccacctcctgggttcaagcaagcacgtctgggtaatttttgtatttttagtagagatggggtttcaccatttggccaggctggtctcgaagtcctgactgcaagtgatctggccgcctttggctcccagattgctgggattacagacaggcatgagccactgcgcccggcctcaggaagtagttgaatgagtgactgaatgaatgcccacgtgagcaaatgacctgtttgctgaactttagactgacgttgcctgatgcccactgcttgtgcagtacgtacttcagtctcagcgtgtctgagaccaaactcattttcaagtcccacttcttgggcttggcattgcccatttgtcagccatccgagtcagaaaccttggagtcagcttttgacttctcatcctgtaacaggcaccaagtttgatttctttcccttgaatatctcttagaaccctcaccttcctccttctctttattcctaccattgtccttactcaggaccatatagtgagggtttaaaagtgcagagtcttggccgggtgcggtggctcacacctgtaatcccagcactttgggaggccaaggcgggtagatcacctgaggtcaggagttcgagaccagcctggccaacatggtgaaaccccgtctctactaaaaatacaaaacttagctggatgtggtggtatgtgcctgtaatcccagctactcaggaggctgaggcaggagaattacttgaacccgggaggtggaggttgcagtgagctgagattgcgccactgtactctagcctgggtgacagagtgagactccaatctctagaaaaaaaaaaaaaaaaaaaaaaaagcagattctaaactcacagtgctgctgctggctgcctgagcttgtgtggctttggacagatgacttaaccactctgtgaagatggtatctgatgcacaggaaatgctccaacgttggctcttgtcgtcatctgtgcccatgtctccctcagcagcctcctgactggccttctccagtctcctggtttggattgaggctccctagaccctacctttctgagactggtatctagtcaggttactctgggagatctccaccccccactgcccagagagcaggttctgagctcttcagtctctccaccttctggccccggctgacaccatccctgccacttctcctggggtccccaaacatctgtggtacttttgtctttcttgcccttggtgttcccactctgcagaacaaccttctctccaggtcaccactgatcgcaatcgcgctctcctttcaaggcccagatcaggtgtcacctgacctttgctgtcctcagatcacacctccctgtagcgactggctcgccagtgtccctctctgaccgagctgtgcactcctccagggcagcactgtcagggtctcccccagacccttggttgtgattctctctccttgtcctgaatctcagttttcctgatacatgggatgctacctgaaggcaggtttcaactttcaatctttttttttgttttttgggtgagatggagtcttgctctgttggtcaggctggagtgcagtagcgccatctcggcttactgcagcctccgcctcctgggttcaagggattctcgtgcttcagcctcctgagtagctgggaccacaggggcctaccaccacacctggctaatttttgtatttttagtagagacggggttttgccatgttgaccaggctggtatcaagctcctggcctcaagtgatccacccacctcagcctcccaaagtgttgggattacaggcgtgagccaccgctcctggcctggaggatttcagatttaaagcaaagaggatattttccaacaaagcaactgcttttcttttttctttttaaattttgtttatttatttttaataaagatgggatcttgcatcttgcccaggctggtctcaaacttctggcctcaagtgatctgcctgcctcagcctcccgaagtgctgggattacgggtgtgagctaccatgccctgtctctttttttgtttgttttttttccaaattgaaacagggtctcactatgttgcccaggctggattgaactcctggcctcaagcagtcctctcgccttggcctcccaaagtgttgagattagaggtgtgagccaccatacctggccctgtagaggggaggcattgatgaaggtcaagaagtcctgttagctctgccttcagaatctaccccaggtccttttagttctctccagcctcactgctggaaccctcacccaagccaccaccttgcagtccacacacggccactgggattggggcggcgttctccgcgcgaaatctggctgtgctcctcccccatgaggccctccaaaggcttcctcttcttaggatgaaacccacactgccagccgaagctcctcaggctcccaccctctacaagctccttctgctccagccacactcaccaggcccgagttcccacctagcaccttccctgggaatgatctccccctggttggctctttctacttattcagcctcaaatgtcatctccactgagaggcctttcctgacctgctgagcttgattccctcccctccccagtcacattactccgtgttatggtacccatccctgtctccttagcttgtttttgtctgtattggctcttccactagactgtaagttgcatgagggcagggatgtctgtttaatcccagtgctcaggatagtgtatggctcgtgatagatgcctagtacattttaaaatgagaacgaatgaagtttgggagaggctcagagcagtgagtctcccccttgttgggggactggggagtgcctgggaggggctatctggtgccagcggtttggagtggctgggatgactctggaatcctgtgaggcccagtcagtttctttggttctcatgcagtgcagtgccctcagacctaaccattttgttccgtgctggcttgaaagggtctgcctccctcccagtgcagcccctgcctctcctctttctcgccccccgccctcctccagagaaagcaggtggtgagggctctctaacccagacaggacttgctgttcagccccagcttgaaattgatttcctccagccctccttgagccaggccccgtgaacagaggaggggtctgagccaggcctcctaggccattggtgggagggagaatgagacagccatttggcccacaggccaccaacttttcccccccttctctaaaagacacacaatggcagttgggctgcacctttgtgagtcaccggtgatagcccatcataaattgttatttcctatatttccagagcagctttatcgggcgttgcctgtgcagtccgggaaccgatttggtatggggtcagttaacatgctgtcttgttgaaatctgtcatcatgcccatataaggcaaactccttggattactttttaccttggcagaatcacaggaatgtcaaggtaaccaggccacctcagcatagctctgattctcacccggtcacctgacttgcccgccctcccccatgactcacccagtggctcagcatggggcctgctgcactgtggctgctggaatctgccaaggacctcctgggactgcccttggttttgtgtcttccttagagtagatcaaatgagaggaaccatgtgaagtagctcacacagggcctaacagagcaaacacaagacgtggaaagcagacttggtgaggcttgagtttagtttgggggttgcgggggtcccagctctgctgcttaacagccctgtggccatgggtatatcccccagcattcagagccttatctgtaaaattagagcacgcagaacaaaccctggtacacactaagtgctcaataaatgtgagtcatttgtgtaattatagtagggtaggccttatgccccacccagtcataaaaatgcctcttgctgttgttggttcaggctcagccccttagtggctttcatggggcaggttgacatggtacccagagtcctcctcggtcctcttcccatggtgtagtgagagcactcaggaccacctaggcctttcctagaaaactgaacccacaccttcccagtgctgccccaccctggtcccccaccccctgcaggacaaaccactcctcccttgttttggggccaggagtcagatctgcccctgagagcagcaggggcccctttgtcctttgacgtcatacccacaccgctcctggagacagccaccccttcatgccagccccaggaaggcttgtaggtggggcgagccagggtgagagtgtagccctgttcctcggccagggcagatgtttcaccatttttaatggagcaattatgagtcagaggtttcagtctctactggttcctcccgatcctataattactctttggctatagaatcctattttgatctcttcttttcttttctcttctttctctctctgtggtcatggtcaggtttttctttttttaaatcctcccaagacactgctaatgttgtctgtctcatgcatccaaggaatctgagatggactgaatattgtcaagggaaaaaaaaagagacccccaaatccagagtgatttcttaacccacccaaatggctttttgtttgtttgtttgtttgtttgagacggaatctcgctctttagccagggtggaaggcagtggcgtgatctcagctcactgcaacctctgcctcctgggttcaagcgattctcctgcctcagactcccaagtagctgtgattacaggcacatgccaccaagcccagctaatttttgtatttttagtagagatagggtttcaccatgttgaccgggatggtctcgaactcctgacctcgtgatccacccaccttggcctcccaaagtgctaggattacaggtgtgagccaccgtgcttggccaacccacccaaattgtgtaccctacaccatcctagtgcttgggagccaacacccactcacaggaggctaagggcaagtttaggtaactcttaacaccacgaattagttgcctgctggcaaacttcaaactccaagcctgaaatttctggttggagtcacctcccagatggactcagggattcattcaccccctcatccagtgctcacggagcctctgtgaggtgcaggcctggagaggagccctgtggcctcagcaaagggcaggcaggctggtgagcacccaacctctggatcgaggggactcaattatgcggataaaggcccctaatcctctcagtgctccaaactcactctgcttctgaaagggatcttcgtaccctgggttcagagagtaggaagcccgcagggaccgagtatgcatgaaacaagcccaagtctgtgggggctgtacatggtcaagatcacagatttccagaccaagccagctccaccctagctgggatgcccaccctgagacacccctctctgctttcactggaataggatggccctgacttggccgggtggactgttgaatcagagcctctcaaaacaggaaaaaggaaaaggatcaccaagcaggagtttcagttgtcaaagacaaaacccttaccacgattaaagattactccagggcctcgcatattcacccttccaccagcagggcccagtttacggatcatttgaatactagcaaaaaaacaagccatctgctggagagattgaacagagggagaaacaggagtgtttgccctgcttccagacacccctttcctgtggcagttcctgcacctggcaagatctactggggaattcccggggtcccactagctcaggacgggtgtgtagcacttgcctaaataacaatcccatcagtgccctgtctgaccttttctccccaaatgccaaaggcctcttgtctggatgaacaaatccctgggcggatttgtccagactaaaacgttaattctaaagactgggccccttaggcactcgctaagattccaggccacactgtctcaaggccagaattggcttacttggctatctttttgaaagatcaaagtttaaaccagatgatctgtagtcccccacccccaccctgaaacctgagcttagctgtaagcattgaaagtaaatggggtgtttgtagctcaccctccctgttctccaggtgaagggccccgtgtgcctgatcatttcatagcaaaatgctagatggggccagaggaggccccagcctctgctgctgccctaattttaaaactgccttttgggagtgtaagtttcctctgttaaaggtagttatttcaaggtaggcctcaccatctcctcctcctggtgagaagctctgcctggagggctgagcactgcctcccgctctgtgggccccacctgccttgggttgagacctatctcttcctggactctgtgtggggagtgcaggctcttccccttggggagaacccagttctttgacgtataatctgagtggtttgggttggttggttggttggttggttggtttcccatgtgtgggatggctccggaagtctgtttgagaacagaggcaggctcagatgggagcagctcctaccccgggccgcctatccccctttaccctggggtttcttttagctccaagcatccattccagtctaacaaatctggtggcagagtctcttttttttttttttttgagacagagtctcactctgttgcccaggctggagtacagtggcacaatctcggctcactgcagcctccgcctcctgggctcaagcgattctcttgcctcagcctcctgagtatctgggattacaggcgtgtgccaccacgtctggctaatttttctgtattattagtagagacggctggtctctactaatagttcaagacggctggtcttgaactcctgacctcaaatgatccacctgcctcagcccccccaaagtgctgggattacaggcgtgagcccctgcacccagcccctctggttctactgagacctcagatctttcatttatggaacaagggggttggattagattgttcgctctcagccctcacttcatgttagactcactaggtggactttgtcaaatgtcattgcccagggcccaccttgagggaatctgtctcattttgcctgtggtgaaattcaggtatttttaaaaagctcccaggtcccatacatctattgtcaattgattttcaacaagggtgcaggaccattcaatgggggaaagaatagtgttttcaacaaatagtgcaggaacaactattaatagatacccatctgcaaagaatgaagttgaacctttacctcacaccatatacaaaaattaactccaaacggatcagatacctaaatgtaagagctaaaactgtaaaactcttagaagaaaacacaagtgtaaatctcatgaccttgggttaggcaatggttattagatatgacagcagaaacacaaccgaagaaaaatagataaatcagactgtttcaaaactggaaactttttgcttcaaaggacactattaaagtaaaaggacaacccgcagaatatttacaaattgtatatctgataagggtctactgtccaaaatgtataaaggactcttaaattcaacagtaaaaagacacaccagttaaaaatgggcaaaggattcaaatagacacttctccaaagaagatctacaaatggtcaataagcacatgaaaaggtgttcgatgtcattactaattagggcaaatcaaaaccataaccactacaaatggtcaataagcacatgaaaaggtgttcaatgtcattactaattagggcaaatcaaaaccataacgtggttgggcctggtggctcatgtccataattccaacatttttggaggtagaagtgggaggatggcttggggccacgaattggagaccagcctgggcatcatagtgagaccctgcctctacagagaattaaaataaaaaattaggccgggtatggtggctcatgcctgtaatcctagcactttgggaggccgaggcgagtggatcacctgaggtcaggagtttgagaccagcctggcaaacatggtgaatgaaaccttgtctctaccaaaaaaaaaaaaaaaaaaaaacccacaaaaattagctggacatggtggtgggcgcctgttgtcccagctagtggggaggctgaggtgggagaatcgcttgaacctgggtgggagaggttgcattgagccgagatcacgccattgcactccagcctgggcaacagggtgagaccctgtctctaaataataataaaaatgagaaattggccaggtgtagtagcatattcctgggaggctgaggtgggcagattgcttgagcccaggagttcaaggctgcagtgagctatgatgacaccactgtactccagcctgggcaacagagtaagaccccaaccctaaaacaaaaaaaaacagaaaaccacaatgagataccactgcacacccaccatgatggctataatcagaaagtcagataataagtattgactaggatgggagaaatcagaaccctcacattgctggtcaaagtgtaatgtggtgcagcttcttgggaaaacagtctggcagttcctcaaaatttaaacatgttttgtatttttagtagagacggggtttcaccatgtcacccaggctggtcttgtctcagcctcccaaagtgttggaattacaggcatgagccaccacgcccagccaagttcctcaaatttttaaatataagaggtatcatatgactcagcaattttactcctaggtatatgcccaaggcagttgaaaacatgtccacataaaacttgtacatgaatattcacggtggtgctaatatccaaaagatagaagcaacacaaataatgcccatcagccaatgaattgataaataaaatgtggtatatccatacaatggaatgttattcagacaggaacgaagtactggtacatgctacaacatggctgaaccttgaaaacatgctaaggagaagccaaactcaaagatcatataccatatggttccacttatatgaaatgcccagaataggtaaattgcaagagacgaaagaaaggtaggttagtggttgccaggggctgggggctgggtaggagggaagtggggttggagagtaactgtaccagttttgcggtggtagacatgttccttgtatttttggttttttgttttgttttgttgttttgagataaggtctcactgtcgcccaggctagagtgcagtggcgctgtcatagctcactgtagcctcgaattcccaggcttaagtgttcctcccacctcagccttctgagtagctgggactacaggcaagagtcaccatacccagttaatttttaattttttttttctttttctttgagatggagtctcgctctgttgcccaggctggagtgcagtggcgcgatcttggctcattgcaacctttgcctcccgggttcaagcgattctcctgcctcagtctcctgagtagctggaactacaggcgtgcgccaccatgcccggctactttttgtattattagttagagacgaggtttcaccatgttggccatgagagacaggactagctggatttcctaggccgactaagaattgctaagcctagctggggaaggtgatcgcacccacctttaaacaccgggcttgtaactcagctcacacctgaccaatcaggcagtaaagagggctcattaaaataccaattaggttaaaagcaggaggtaaagaaatagtcaaatcatctatcatctgagagcacaggaggagggacaatgattgggatataaaccccaggcatttgaggcgggagtgggccaccccctttggttcccctcccactgtatggaagctctgttttcactctattaaatcttgcaactgcacactcttctggtccacgtttgttttggcttgagctgagctttcgctcaccatccttcactgctgttcaccgccatcacagacccactgttgacttccacccctccggatccagcagggtgtctgctgcatttctgatccagcgaggcgcccattgctgctcattcgggctagaggctcgccattgttcctgtgcggctcagtgctcgagtttgtcctaatcgagctaaacactagtcgctgggttccatggttctcttccatgacccacggcttctaatagagctataacactcactgcatggcccaaggttcaattccttggaatccgtgaggccaagaatgttaggtcagagaacaaaaggcttgctgccatcttgggagcagccactaccaacttgggagctctaagaacaaagacccaccggtaacagccaggctggtcttgaactcctgacctcgtgatctgcccgccttggcctcccaaagtgctgggattacaggcgtgagccaccttgcctagccttgttctggaattagtggtgattgttgcacgatcttgtgaatatactaaaactccctgaattttatgtaaaagggtgaattttttggtatgttatgtgaattacatttcaatttttaaaaattgattctccaaattatgtacatatttaaagagtacatgaaagagagggagagaaagaaaagctggatgcgagatgccgcaacctgattccactcactcctagatttgttgagtacctgctatgtgaaaggtaccagtccaggcagtgggttcccacagcaaacagaaccctcctctggggagcttatgctgcacttgggagggagactggttatgaacaaagaacatagtttttgatgatgaaaagtgcagtgagtaaaacaatgcagtgtgaggccgggtgtgttggctcacgcctgtaattccagcactttgggaggccgaggtgggcggatcacctgaggttgggagttcgagactagcctgaccaacatggagaaactccgtctctactaaaaataaaaaattagccaggcctgtaatcccagctactcgggaggctgaggccagagaatagcttgaactcaggaggcagaagttgcgttgagctgagatcatgccattgcactccagcctgggcaacaaaagtgaaactccgtctcaaaaaaaaaaaaacaaaaaaaacaaaaaaaaaaacccaacaacgcagagtggagtgatagcctaggggagatgacagagtccaggaaggcctcctgggttgctgacatttgaggcaagtcctgagtgatgagacaaaaccagctctataaagagctagacgaaagtcttagaccagtatttctcatgaggaggagacagcactccaaaatccatcctttggcctggcgcggtggctcacgcctgtaatcccagcactttgggaggctgaggcgggtggattacctgagatcaggagttcgagaccagcctggccaacatggcagaaacccgtctctactgaaaatataaaaattagccgggtgtgatggtgggtgcctgtaatgccagctactcgggaggctgaggcaggagaatcacttgaacccgggaggtggaggctgcagtgagccgagatcatgccaccgcactccaacctggcgacacagcgagactctgtctcaaaacaaacaaacaaacaaaatccgtcctttgcagcagcaacacgcacgctttctggcacctcaaaggggattgtccaagactggaacactggctgcagggagggggccgggtgcaaagagctggtttctgggtggacacgcaggacctttggaatgctcgctaccccactcagcagtatttatacctcttctccaactgcgaagtcagagctttttcatgcaggctgagaaaactccgaataaggcaacttcaggccaggacataagacgcattccatatttcactgtaattgctttcaaattaggttatgtcgtcatgtaacaggcacacacagtgcacttgctttgcccctggctggggttgggtcctggacaggctgccccgtgtgtcgctgaactgccgcagtgctagccctgattgcctgggcagtagggctgtctgcgtcccacgttgctgcacccatctaatttgtggctgtgttattgtgacctgctcgttttctgttctttcaacctgcttcctggcttttatctccttcagaatctggtggcagtggatcttcaaaaagtgctcaggtgtgcagtctcacaggccagaggctccacgggcccccttgccagggcgagcatctctgcctgtgccgctggtaacccagattccagaaggcttagccgtctggccctgaaagcgcctttatagttggtgatgaagcccatgggctggggagccgtttctgctttcaggaactgaaaagatgccccagtggggctaggccttgcctgaggtctggcaatagcctgccagatgggtgataagaaggcctacccaggtgataagcctacccaggaataaatagctgtacctcccctgtgtccaagccctggacacccttccctaggacccatggaagcaggaaccatgggcagcgtcagaggccacagcaggcaaggtggaagttcaggaggtgggacggcgccctccccctcaaagcaactgatgccccagcggagcgacaaaccctacacggtatttcagagccaaggtttgaaaactcccagggtgctagggagctccgtctggcctccgggtacctggggttggggctggctgtggccagttgcagtcaaccctgagcctgggcaaaatgcatgcaggctggtcctcctgggtgatatcctgctaggcgggtgggcagtgtacacggcagaagagggttgcggcatgaggcagcaaacgtttttttctaaaatcttgtcaagcgtggggtccgtggaatccacatgtgagcatcagcctggtgggtggggagagtgaagcctgcgatccagtctggatcatgtgctacacagtgcagagccggcatgctcacccctcctgagggatcgctcgagcctatttctaggcccaaagcgactttgcaagagactccctttattctgggcttagtggaattccagcttccaacagccatttccctccacccccttcagttctgagaacatgttttgtaacaggaaggcaggaagaaaagagaaggcgagtttgttcagctgggtcagccgcatcccaccaaggccctttcttccctccagctcaccatcgctctgcccactggaaccactcggttgccctgtgtctgccgaatgtttgtttcttaatcagcgccccagagtagagagggctttgcctcttcgggttgagggagggaatcattgatgaatggctcattaaagcccactgctgccacattcctgggtgcttaggtcacctcctgaacaatatccatcattcattcacctaccgccccacatcctggcggctgggaggggtccctgtgacgcaggaaggactttatgaccagagatgctaggtctccgtctccctcctgcagcccacagtgacaaagcagaaactgctcttggggccccctgaagcccgccttagctgggtcaccatgggccttggcacacggaggggtgacagtggatcccaactcaactgacaagcttgcctttctctgttcttccaccccccttccccgcactcacaccctgtgctattttagcaaccagagaagcctctttaataggctgcccgtgtgcaggggcaagctctgaagcctcctctctgtggtttggttcacatgtgttctcaaagacagatgagtccacatccttccttcctccctagataggtcaagggctgggtgcaggctgccttcacaggagggccagggacaggctgggaggagcggggccaccttttgcgaagcgggtgatctgctggggcgttgctctgcctgcctgccttgttctctgagtttacctctagcttggggaccaagggtgggctggggccttctttttttttttttgaaaccgagtcttactctgtctcccaggctggagtgcagtggcgcgatcttggctcactgcaacctctacctcccaggttcaagcgattctcctgtctcagcttcccgagtagctgggtttataggagcccgccaccacgcccaggtaatttttgtatttttagtagagacgaggtttcaccatgttggccaggctggtcttgaactcctgacctcaagtgatccgcccgcctcggcctcccaaagtgctgggattacaggtgcgagccactgcgcccggccctggctgggggcttcttgacctgactctgctgtctctccctcactggccagcacctcccattctactcagacatcgtggaatgaatgcccaccccgtgtttgtatgtatcatctgtgtctgtgtgacattaagcaagtcactgaacctctccctgcctcagtttcctcatcaaatggagatatatcgcatgtgatcatggggttggaggttttaaagagttgctaatgtgtaaatagtaagaactagcaattagccgttatagcataattacctttaatatgtcatgccccccgcacccccgtgctgaatgtaattttgcgggggggcgggttgagacagggtctggctctgtcaccgaggctggagtgcactaacacaatctcagcttactgcaacctctgcctctcaggcacaagctgtcttcccacctcagcctctcgagtagctgggactacaggcgctcagtaccacgcctggctaatttttgtagtttttgtagagatggggttttgccatgttgcctaggctgatctcaaactcctgtgctaaagcaatcctcccgcctcggcctcctaaagtgctgggattacatggtgtgtgccaccatgcctggctggccagaatgtaaatgataactgttttgcttcctcctgtgtccagtacataatagggctccaagtcagtatttgtgaggcaggtgcatgcctcttagttgcggtcctgagggcatggccactgccacgttctggacagtcagagtcgctgctgcccctggaagatgaccgcgatcatgaagcccaggagagctcgatgctttttgcctttccctcctcccacagagggctggcagctctggttcctcccaaatgaaatagaaaccttgagtttgcatttcttctttggcgtgccggcagggcacctctgccttcctcttcctgccagggggaggaagtttctctcaggggctcttcaccctgctttattcctggccatcacacattgacccttgtccccttcggctctttccctgcatggcagggacagcatgaccgtttaatggctttgtgaggccagcatgccagcctcacttctttactcccttccttctcggagtgggctctgtcccttctgcaggagggctttggcacatgctcttcccagtatctggaaggtctccctcatttttatcttattaactcctcatccttcagctcagagtttgagaatgacttcttcaaggacacctttctgtgtctgcctcaccagtcgcttggtgcccccccaccccgccaccatgctgaccgcactcttcagctcccatcccaggggaggtgacacaaactcggccccaggagcccagcacctggctttaaacccagctctgtaactttctaggtgtgtgactgatgggagcaagccacttcacctctcaggccctccgtttcctcatctgcaaaatggaggcagtactagcacctccctccagagatgattacgagggtgacagaattagtaagtgaccaagtgcctcgagcagtgcccgcccctagtagactctatggaagtgtctgctgcagttattgctgttattattaccacttttcctaagggcgttatttctggagtggactgatcgcttgattaatgagatcagacctggagcctcatgagagtgtctgcttttgctcactgttatggattcagcacagggcctggccctctgctgacccccagcatatgcttgtccagagaatgaatatgtacggacccatggtggcctggggcatcatgaggtcggctgcccacattctgagaattttgcatggtggagggcggcgtggtgggcgcatagggcccccatctatagaaaccacctctccacaccatccaccccacgcagcgtagtctaaaccgggtagggagaggaaggatggaagcagagtgttatttttgtaaccaagtagaagaagcgatgaatttttaatgtcccattcgaactccagctcctactcaccagtctctccgcatggagaagtggccgtcatggtcgacctgttcccaagggtggccttgtgagtgcaggctctcctcaccagagctgagggctttgtgaacctctgatgtcaatagatgcccctcatcttccaggaggacaaaacagggcaaagcaagacatggggtgagaacaggagtgcatcagtggggttccccaagcctgtgtcaggtccggatctgggtgggagttcccttctgcgtcatccaggccaggcgagtgggcatcctccctgagcacctgtgcttggggctttgcctgtgtcagtcaggaagacagagtacacggaagagttaccattgctttcagagcaaaccttcctttgacatgcatttaacacagcacggagtgattgacatgtgtccttgtgtttaatccctatcttaacctctcggttactgtcctgtttatcagtgaggaaactgaggcttattgcttgcctgaggcctcagtggcagaagcaagatgtgaatccgcacctgtgtgatgcccaagccagagctcttgtttactacccagagaagatgagcacaggtgggatgtacgtatggagggcgggtagggcagcagcccctctgaggacaggtggccagaacccaagcggcgaggtttgttcacagcctccacagggtggggtggggccatccgcagagggtctcctgccatcccattttccctgcataccagtgggtggtctgagagcctttgcagagaagagactggatctcagcacgtgcttatgtgcgtgtgtacatgcacacacatgcgtgtgattcatctggctcttactttatgccaaggagcctgtcacatgctttaaatgtattttccctagtttaattcttagagcacactgcaggaggtagattctgataaatccatcttacagggaaggaaacagacttaagtaggtaaagtcacttggttgaaaacatggaatgagtaagccaaggggcaggtattcaaacccaaacccaggtctgtgcccctgcagagcctgcaggagcagcccacacaggccaaggctgtgaggggtgctgtttgcacgcgtgcgtggccctccctgcagcccaggtgcctaggtctgggcctggcaacaccagagcacggggccttgccctcggggaacagccctcttttgtcctcaggctgtgggatgtgtcttggctactttgctgcccagcagtgcctgctctcaggcacatgtgagagtagaggcctagcatccgtggccacttccttcccagcccatttgctgctgccctttgctctgcagggctgctgggctcctgggctccacgcctgcttgctgcctgccatcaaggctggcagtgctctggggctgtaaaggtgcaggcgccgtacttcccaacccctggagctcgcacatggtaggagagaaagctcatgtgcatgcaacatccaataagactaaaagtgactgggggttgctacgggagaggtgctgagggtgggccggggacagagcaggcacactgtggagggggtgggcaggactcctgagaccagggcagggagggaggagatgctgggaggcacagggccatccagagagctgccacttcctgagcattgccatgcacgctgcaggcatggccatcttgagtcctcacactgcccgtggcctaggtggggtcttcatccccacgttgcagaggaggaaatggaagttaggaaggttaggtgacgtgcccacatgagtggtgtaagcatggttcccgccctgggctctctgaattcagtattgtatgggggaggctgggaaggtgagttagtactctccgcagtgagaacctgccttggctcccctcccctcaaggagttcatagccgtgggagggagggagacaagaactgttggagacaagaactgttagagaccagagagcaagggcgtgatgtggtctgcagggaggaggctgtctgaggcagaaccgggtcagggaggccatggtgcgggtaccctccaggcacggcatttggcctgacttttgaggggtgcccagggttggctacatggcggggcggaggtatctttagtgggggaacagcgttgtgccaccaggaggggtctctgtctcccaggtagaggaattctccatggtgagaggtggtggtgggggatggtctagctgtccactcttgccccctttcggatttggaaggaagccccatgctgggtccacactggtatggcgtattaattaggcagctgctttgtctgggagggggctttgtgtcgagtctccctgaatgagcagggctggcgacagttgtcaaaacacatggtgcttggtcagagcccccgtagaagccccttgtcctccgcatggcctccgcctgcacccggggcgtggaatgtgctcttgtgtgtccctggctgtctgcttgcttctacactggcccctgcagatggagggggtggggtacaggggttcctataagaagcagacacttggggtttttcccaggtcctgttgcaggagggtgcgtgggctggtttccctgaaggcgcctgggcgtgttggtgttaactgatctgagatcttctgtggccctgatgtctatgagcatgccccagcttgcagggggctgagtagccgggcaccaccaggaggctgcgtgccctgtgcttgggtgtacccatgccctgtcagcatcgttggtctgttagggtcagggacttcggcttcttgtttagtaccctccatcccttccagttgatcatcagaaacattctccttagatgcggctgcctgaccccggtgagggggcctgcctcccacttgccttccagcctcctctaagctgcactgagtcttaaaaataggaaggatagggctgggtgtggtggctcacgcctgtaatcccagcagtttgggagaccgaggcgggtagatcacttgaggccaggagttcaagaccagcctggccaacatggtaaaaccccatctctactaaaaagacaaaaattagatgggcatgttggcatacacccgtagtcccagctactcaggaggctgaggcatgagaatcgcttgaacccaggaggtagagattgcagtgagctgagattgcgccacagcactccagcctgggtgacagagcgagactccttctcaaaaaaaaaaaaaggaaaaaaaagaataggaaggatagggcatggcatgttctccaggagacagagggacgggggcatcttgcttgcaggaagccaggcgacacaggcgtgtgtgcagggctcagagggtctgtgttcctggcctttcctgggagggcttgctcttgggctgcccaaagctcaaagagagactcgaggaaatcctgcatttatgggagcttttcttttcctgccactttcctgttctgggttgtatctgtgcacgtgattggaacgtagcagcctgagctcctgcctgaggagagcagccacgggtcacggaagccagggtccagctggggcctttgggtctagctggcagatgaagggctggccttcatcaagaaaacaagccccatgagggcaggagcccgacctgttcattccacaccaccgagcctggtgctcagtcatgtttgtgtgactgagtgagccggcggcgggctgaggcgcttttgtctggtgtgcgtactggtctcccttgaggcagcttgggggtgtggaaaaagcacatgttgccaaaattgacagacctgggttcaaatccaagctctgccacttaccgcctggatggtcttgtgatgggtcattaaccaccccgagcctcagtttcctcacatctgcctcccggggtcactgtaaggatcagaaacaatgtgtgtatcggccatgtacggtgtgtgtcggcgagtgctccgtggcagctgcggttctcctgaggtcagagctgcggccctgcaggtgtgtggagagagccccgacagccaggctgactctgcgcactgtcctttgttctgcttccccagaccttcacggcatggtgcaactcccacctgcggaaggcaggcacacagatcgagaacattgatgaggacttccgagacgggctcaagctcatgctgctcctggaggtcatatcaggtgagactcccagccacgcagtgcggccgagccctggcacaggtgctctgccacagcggtccccagagaccctgcccacccagctgtcccattgctcctggggaggagagggcaccccttaatagctgcacggtggtctgatgggtggggccagagtggcctggtgggccagcagaggaacctgcttttggagaacagaggagactctaaagcctctctccctctcgccctctctccctttctctctctctgtctcgccccctcttttctctttgtgcacttctcaggggagcggttacctaagccggagcgggggaagatgagagtgcacaaaatcaacaatgtgaacaaagcgctggactttattgccagcaaaggcgtcaagctggtctccatcggggcagaaggtgagctggaggtggggcagcgagggtcctgctcggtttctgacctttaggctctgaagcacaacatctgcatcctgaagagaagttttgttggtggcagggcgcttggggcactcagagccccagtacatactcagcagtgatcacaacaactgctcttgatatgatgctgggcccacaagctcccccaaacccttggaaaaatccggtgggcgcagtccaaatctaggaagtgcaacccacccaaccacgggggcgacggcttctgcagggggaggaatggttttgactcggactcaggtcgccctcactggttctccttgtgccaggctcagcagacagtgacaaacatgtgccatggcctctctctgtaccaggaacacctttctcattatgccctgcccggtatcagagaaggactggaggccccatgtcaggcattgggacagggagtgcacggccaaaggtcagtgcctagactttgccctgtgtgcatgggcttggagaattttgcctctgaccaccccaggatcctcctgggccccacgtagataaccaggaccacagtccactacctgcaggccctcactagagcagcaggctctcagcaggggcccctgggttgagctcccaggcgcttttagagacaggcgaggcctgatggagccccagcagcatgagctcgcagtccactcattagtcagagtaagatttcttcaccctgacatccatgttgtcccagcttctagaaaaacaaagtaaactaattgccgttaatgacagggctctgagagtttggccaagactccgggccagaatgtgtgtgctgagttccaaggctctgccccggcccaggacctctgcgatgaggggtgccaagccttgcatgccacagtcgaggtggttggtgtttgtttaaaaaaatcacaacccaaaaattcagtcaggccctgagattttctgtccttgcatgggtctttcctccaggctctgttccagccttctgcttctcacagctgcatttattttgctcaaatgctagtctgtaaatacagaaggggttagaggagagacccatgtcagtcatcagttttcatttggagaaaaacttggtctaaaaatgttctctgttcatgcccaaattggttcactcccaatccctgtgactgtggggccttggaacaaagcctaatggaggcgttcctggggctcaaggcacctgagaaccccgccccaccctgtccccctgtccttccacatgattgggcattcgcgggagcattggcttcccgtgggggtgatgagaggggccggaggcacagctgcaggtcagagaagcagctggtggatgtgtcatgagaaacgccatcctcctctcctcaccggaactccataagccctccgttaccagctgcacctgtacttgctgagccggggagctgcggccttgcccagctctgcaggcccggccctcaggaggtgcacagaatagatttcctgaggctcgagctgcctcgctgcactaaggggcaggtggtgctgctcagtttctgggtctggggctctgaaccctaggacagggtggacactgggtccctcccctgtctctgggcagcagaatgagcatatttcctcctctcaaaacccgaaagctgtggctcatggacacccccttcctctgggtgtgtccccgggggaaggtgagccccatcttctctgtgacctctccacctgcttccaagcaagcctgccctggagtattctgctcagaggtcagtgagcagggtctcctgtggtgtcctgggcctccagctctgcagttagctttggaactcacccctgtgcccagcccttccccgagagtgcttgcagcagtggcgcccctctgtcttctttggaagccactccatcatgccccttgcatatggcgtgttgacaagttgggaggactgccctaggcacggctggctgatggactctgggatgaggcactgccttctctcacccagccgcagacacacagctgtcctgggccttgcagagatgatttttctcttaagttactgaggctgaagaaggtgtggtccaagcccttcttttgagaagtttcagcaatttttttttttttttttttgagatggaatctcactcttgtcacctaggctggagtgcaatggtgcaatctcagctcactgcaacctctgcctcccgggctcaagcaattctcctgcctcagcctccagagtagctgggattacaagcacccgccaccacgccaggctaattttgtgtttttagtagagacggggcttcaccatcttggccgggctggtctcgaactcctgacctcaggcgatccacacctgcctcagcctcccaaattgctgggactaaacaggcgtgagccaccacagccggccgcaaatgtttgtttttaggttagttcagaaagcgtgcagtctggcctcaggcccgtgctctccccttcctgacaacacagcagccatgcttgttcctcactggccttccaggcactggatccagtggtggtcagagcagccccgccctcacgagggcaggcagacagtgaacaagtaaacagcccgaccaacatgtgatttcactagtgatgccttggggcagcacaggggccagggagaggaactgggtggcgggttggggagctccttgggacgggcagtcagggaagccaccacgagaggtgacacaagcagaagcttacacgatgagaaggaccagccagttgagggtcgcaggctaggggcgtgctttgtgagtggacagagcgtatcaaagcaagaaagagcctggcttgcccagaggatgcagctagagaattccagcaggatggcagggcctgggccttcagggcaagccctttccctgtgggccaggcatggtggctcacacctgcaatcccagcactttgggaggccaaggcaggaagatcacttgagcaggagtttgagaccagcttgggtaacataataagacccagcctctacaaaaagtttaaaaactagcaagatgttgtggcatgcgtctgtggtcccagctactcgggagactgaggcagaaggattgcttgagcccaggcagtcaaggctgcagtgagctatgactacaccattgcactccagccagccagaccctgtctcaaaagaaggaaaccaaccatgctcgctgctgtgtcgatgtggattatgggcgggaagggtacataggaggcagccgcattgagctctggagatgacagtggcttggtggagagtgtcggcagtaggattggaaggaagtggacagattcacaataaacaataatgtagtgcacatttgctgactgcgagatgaaaaagaccacctttgccctgagagtgggggcccggggtgcccccctgtagtcaggaggtacgcagattacggcagaaatgtacagagcactgagagttgagagaggtgtgaacagaggccacacgcctgggaccagcctcttggaggagcggttttttgagttgggtcaggagaaggagctggctgcggggccagggacccttgtggccagaagcctgcaggcgctcagcagcaggaggctctgggacagtgctgcctagagactgttccctgcattttctcctgagggaggtggaggaggacaggcctgggagatgcaaccagggggtggtttggagcctttctctagatggggctggaaggccaccttcaggttgggcggaggagcctcactctggttttaacgaccttctgccctctgcccccttccctgtgtgcagagattgtggacggcaacgcaaagatgaccctgggaatgatctggaccatcatccttaggttcgccatccaggacatctccgtggaaggtgacagccacctgtactgcccccgcttcccacctgagtcagggcgggttagaggagagctgaagtgtgatcttcatgcttcaagcctcttcctgtttccttggggtcactcacagggcctggcccttgcaggggtagtcagtgggtggcaggtgaagggaggctcctcccagctgcctgcctcttggctccagtgccttccgagtgcctttgctctcacagcctcatctcagtggaccctcacgccaccctcatgagatgggctaggatggctgggcccgttttacagtccaggaacccaagtcccagaacagactagtgagagagttgggcctgggcctggttctctgtctgcttgacatccccatccttgaaacttggcccccatggacccgttatgagctcaggccgtccaggaatggacaatttcgcttccctgcaagcacctgtgtgcacacaggatgggcagagccacctgggctagcgtgcaggggctcccaggtgccaggtcgcagtgatgactgggagagatgtgcttcctgccctcgaagggctcccggtctgtgaggacagccgagctatccacggggaacagaagggccccctaggcctctctacagctggtatttcaccttgttcaaaagaggccaaggccggtatcaagggcctgtctgcagtgtgttctggtggtgaaaggcacaggcttggtggccaggcacatggcacagattcaggccctgacaccaccacctcctggggcagccctggtcaagcgactctcctcggggccgtgaggattaagcagggccgtgtgtcctggcagttgggcctggcagcatccgtctgcatccggaatgggagtggctgtcccgctgctatcactgctgctgttgttaggacagatatcctctccccttgggtttcgtttgaccccaggcctgagccgaaagtcccatccaacttgggctgagttctgagggtttatttttgagccagtgctcactgtctttgtgtgttttgcagagacctcggccaaggaagggctccttctctggtgccagagaaagacagccccgtataagaacgtcaatgtgcagaacttccacatcaggtaagcgccagtcctggtcatcctctcctttcctctaggaacctgagatccttcctcccacctgccctgtttgctgtgtttttgtcgtggtctgtgagatgccagccctcagtcagcccctccctggccacgggccctacaagcccatgggaaggtcacctggtcctctctgaggaagaggaggcagtttcccagccatcctggctgaaggcagtaaggtcagccctctcgccggcctaatagaacgttcttcgtccccaggcaaggtgactctcagaagcaacaataaagcttttcatttttgagacagggtcttgtgctgtcacccagactggagggcagtggtgtgatcactcatccctgctgccttggcctaggctcaagtgatcctcctgtctcagcctcccaagtagctgggactgcaggtgcatgcagccacacctggctaatttttaatttttatttttagtaggaacagggtctccctatgttgcccaggctggacttgaactcctgagctcaagcagtcctcctaccccggcctcccaaagtgctgggactacagatgtgagccactgcctgcctctggcctcttcctttattttgacagctcaggagtgaattgtttttagaattgctagtaaatttagtgttggggaaaaatgtactctgtggctgctaagatgaacaagcctcagctccaccatgaacctgcttccctcagggtgagcgggagatgagacatgtccaccatccccgtagctgaggcgagcatgggcactgccgcatgaggtccagggggcggcaagaggcaggcctgcctggtggttgggagcactggctctgggggcggtcctgaggtcagatccggtttgccttgtggctccaccctctgagtctcctggatggcccgcacaggaatgaagagcagggcctcatggggtttgcagcggcctcaggctctctgggacccttgctgggtacagagggcttttcccatcgtgctcaccctgatagcatgtggtccctcccttggtcactcttctctgtgtgtcttcttttttttcctgccactaactgactgaatctttctatagtttccattcattttcttcaactagtaagtatctagcatgcccgctgcatgccgttagtggagatacagtggcacccaaacaaagttcccatttgtgggaagtttacaccacagcgcggggaccagctgttagcacagcggccagtaatcctgcagcataacttcagtgagaagtgctgcacaaagacagggaagtcagatgaagaaagttccctgggtggcctttctgaggaggtgacatcgagcttgacctcagagggaaccaacccttagagggtctcagggaggagaatgtgacccatatagcttgtaactgaccaacttgtggccttggggaaggtctctttcctccagagaccagcatgccaagtgaaatcctggcatttagccagcccacggactggccttcctgtaagtcaggtccgccagggtgtggaggccacacagcacaaacaccagcatcctgcagtggccacctcccccgaagcggcctgtctggttcagggcggcctcccatggaaggtgctagcagttataaagcagttgtcaggagtcaggcactgatccaagcatttactcatttaatccgcacaacagccctatgtagcaggtatgtcactatccccatcatacagatgtggaaaccgagatagcctggcttacccgaggtcacactgtcagtaggcagaagagtcaggatttgatcacagactgcctggccccagaggtcatgcttgcagcctctctgccacactgtctccatgcagtgcctggcacaggccagactgcagtgaatgggaattagtcactgctgtgggtgcacagggccatacggcactctcatgacagtgagcgggccctcctataacctttgcctttccttccccagctggaaggatggtcttgccttcaatgccctgatccaccggcacagaccagagctgattgagtatgacaagctgaggaaggtgagtgtctccagctccccttgatggcccacagacgtgccctgtctgaccccctaactccgggtcaccatccccatgcccttccatcgccagcctccagatctgggttctgcacgcagatgggcagcctgggagagccttgtgcaggctctccgcaacccctggctcggtggctgactctcacctcccttattcccctcgtggactgtccagtctccctccatggcactgcaaccaacccggggttatttaagggcctggccagccatgctttataactccccttcctcaatcttctggattctagaacctcctctgcccaaaggggcagagggcaaggaattccaaaccatcaccacaagcccatgttgcccatgcagggtcctgctgtcatttgcctgtacaaagcctgtatggatccaggccctggccaccagaagctgccagcctcgtgggggaaggcaggacaaaaattgtgtccaaagcaaagcaccacaccaggccgtgtacatgtgctcaggctgaatggggtggcagggcatggggtcagatcagtgctgcggaggaggctagtgtaccccgagcgagcaggagccaggaaaggtcccggaagaagaggcagcttagagccagaggagggcttcctgggggaggcaccagatggcacccagcccgttccagccacagtgagcaagagagctgggccccggccagggagagttggagtgcagtgggctttagtcctgtaagcagtggggagcctgtgagggggctgggggacactttagggtggttgggacctgggacctctcggtttgctccccttacccagtccccagtgctctctcaggcctggcccacatcttccagtcaatgtgaaaaccaggttttagggcaaggggcttaagctagggtctgtgggtggctggaaattgtatgaaaagagtacacctgcatttttctggagaaaaagccctggtttgccccacaaagatttcacgaggcactcctgtgagtgggaattgaatttatccaggcggtgccctcccgctcacacatcacacgtggctgagaactgcctgaagaaacccccaaccctcgccctcccgggtctctccctctgggccagccctgcctccctcctgctcctgcaccctgccctgacggagttcttgttgtccccacttgcctccttctaggacgaccctgtcaccaacctgaacaatgccttcgaagtggctgagaaatacctcgacatccccaagatgctggatgcagagggtaagtcatctcttctgttcagccaccactgtgcttcctgatggccttttctgtccagggctggcctcgggcaaggggctgtgggcacatcagagctttgggtcaccttggggagctggcagagccagcaagaagggctgaatgattctgggtgaactggggacagccatgtcgccctgggagacagagcaagggtagcctgggctggccagatgccttcagggatgaagaagcgtatggggagggggagctgaaggatcaactctcctgagggtgcatctcctcagggcccaggaagggcaaggtggctgaggaggggtgcttcaggcttcctgcgagcaaccctggcctctccctccctacctgcagcaggcatggagtatggagcccgacaaagtggagtgttttgttttttccttttccggctttgctccatttcccagccatgcactgccccatttcctagccatgcactgccccagctgggacctgtgtctctggcctctggtggcccttggagttgactgtcctgctgctccttgaggccattctcagagagaggaagtggcctcattttaatccgcttcccacagccttgtcctttccagacccatgggagagggaggggctgagggtgtggctgagcccacccaagtcacgcgtcactctgcaggtccctctcccccaaggccgtggccttgggagcccgtggatcccagtgagtgacgcctccaccccccgccctactcgggcagtttaacccttgttgttcacttgcagacatcgtgaacacggcccggcccgacgagaaggccataatgacctatgtgtccagcttctaccatgccttttcaggagcgcagaaggtaccgagcagggccaggcaggccctcctcgccgccaccgcgcaatgccgccgctgcctctcgcctcccgtgctcacctcatttctcttgcagacggcagtggcctctctccaactggaagccacccccagctccctggcgttgctgccccctcagccttagctcacacacctattgggtacctcatctgtgccaggcttttccaggcattgaggatgccctggtgactgagtcagacaaggtccctgttctcagggcacttccatgctagtgggagaaacatacagcaggcctgtcacaggagtggaatagagaaaatggggccagatgggggacagagatggctggggtgaccttcagctggtgctgtcaatgtggaggggtgaagtgagcaggtacttgcagcaggagctgctagatgcaggctggggcacaggtgttccaggcagagggtgaagcactacgaaggccctgagacaggaagaagcttggcgtattcagggaccagctagagaggagtgagtgacacgcagtgatgggtcaggcccaacaagacccttgtggtgtgggataagaaattcatgttccactctgagggccatgggagccccttagggtcttactccgtggtgggagctgctcactcacattttcagacagatcatttagcaactgactcctccaacccaaaacaaagctgcctttatagggcccacagctagtctgtctccagcccaggccggttagaaaaggaatgcaccctattcggactccacaaaaccccgcaaggcatgtccacgcaggcctggggctggcttccagtccagagcaagtgctcttcctcctgcatgagcctcaggccggcccggccgccctccctgcgtctttcactctctcctgcctctctctctctttctctctctctctgtgcagatattgtgggcactctgaggccagatgagaaggccatcatgacttacgtgtcctgcttctaccacgctttctcgggggctcagaaggtgagctgggccaggcacacctcgctgctggggctgcagacctgccttcaccaccgcccttgcatcaccgctggccatctgtggttggagccctggccaggccgtgggccgccacaccacacagactgaccctgccggcctctgactcggaaggtcccctggggcaggtttcccgcctggccggtgctgggcctgtgctgaggagtcacagacctctgtttgaacacagcccaccctgggaggtgggtggtggcatcctaggctctcaggcggggaaactgaagccctgcattacagtcaatggcagagctgggatttgactgcccggcgttcccactcgccctgtccatcatctgcaccagggctgcctgcctgcccctgccaagcccttcgtggggagcactgggctttacccgttttgcagctccttcctgccaggaaaggctcagcatgtgcagcccaacctgcactcacggtcccagccctccagaggccaggcagagcccacagagcttgcgtggcagtggccgccctcctgggcccagctgacctcatgctgcctcacagctcctgccgggccctcagcgttcacgcagaggcccaagcactgctccccccgcttgccttgtggtctctgaagtatctcaggcagcattcccgatgcctgctttgaagtgtcagcagttggcacaggttcagaggaggaggcagaatcgattcttgtttactgaacatgtactacacgctaggcaccctccaaggccttcacatgcacaggcttccagagggtccctgtgcacacccccaggagggctaggcgcagttagccccatttgagagaggaggaattgaagtttagggaaacagctattcctaaaactagaaggggggggccgtaccttctgtggacccctgctttgagcctcccaactagcaggtgcattacctaccgtcagtctggcctggccccactctgccacctcttggtactgtgaccttgggtgggtcacttgacctcagcttccccacctgtgaaatgggcatcgctgtagttcggtctcacaggattgttctgggcgtgaaacgagctcctgcaggcaaagggcttagcacagtgcctggcacggcagctgccatttaggcagctgccagggagccacagtggtggggagtgtggttcttcccagcctcgggccagaaaggcctcttcacctcctcagcatgcgattggagcttgtgtttggagtgttctgctagagggcacgggccaggagggtggagggaggacccctgacccacactcccgcgggagggtgggcagggaccagcagcaatggacgattcgtcaccacagaccccaactaacagcatgtttgccattggactcacccctacgggccccgaaccagccccctgcccaccacatggcctcaccagattgcttttctttctacccacactgctcccctgtgcttagggctgaactccagtctggaggctctgagggattttgggggagcagggactggcaggcaagcccaggacagtatgggtgggtgctgaggcactgggcctggaggcttgtcactggcccctctctgagggggtagtggaggcccggctgcagggcgctggctggtcagaaaggaaagtgctgggtccctgtgtgctcctcaggacagccccgtggtgctgctcctgctgcctcgtttccccagagacccagtccaagctcttgcaagagtgctctctggggttcatgttttataaacgcagagtgaaccccaggtctagcgccagtgtgcccattctgtcctgagatcatttatttctagtcaccgaagcgttcccgcctcgttcctttattcactcactcattcagcaaccctgaacaccgccagtgcactgagccccaagctggatgcgggaactcagcggtgaaacatgattcccttgccttgcggcagccccgtgctcacagagaggacttgagtttcgggtgccagttgtctctgccaagttaggagtcagggactgacctctgtgacccccacaagctgcagccctggctgtgttttccacactggcctggggcccatgttcattggctgaggaacctcttggacctcatctctgaggagcaccgcctggggccctgggtgtgtgtcccgcagcatggcgcggggtgtgcacgtgcgtgtgtgcgctcacacgagcaccggctgccgcctccccgcctgtctccaggtgccatgtgtggaggggagaggctgggcgtcgctgcctgcagcactggctctgagccgttggccaagcctctccattttccttccccatcactctgtagaccctcctcactctttctgttcctgttctgttgccgtttcaactcctcctcttggaccctttctgtgcttcctgaaaggtacctggtctctctctccccgtgtgcaccccctgcctcctctacactgttcactgccccctagcaggacagggcaggacgctctcctgtagttcaggcccagggactatgtccaccactctcaccctccaaagccccagcacttttctgccccacggatggtgacttctgtcctctggagctcctattaacattgcctccaaggcaggagagtggacaggcctgagtgtgctcctgtgcacggaccactaggctcctccgggacccgggcgcccctgctctgttgcccccagctctccagctctcggcttcccatcctttcaccttcccaccgggagagactcctccgcagtcttaggtccaacgcagccgacccgtccagcctcaccctcctctgtgtggggcactagagggtttgcgagcagcagtgggagggctccccaaccctcctcggtgcctccagggtctgggctttctggacccaggggcattttgcagtcagcagtgaggatgccaacaaggcctattgggacagggcaccatctcactggagctgtgcttcctctccttcccctctgtgaggagttccgtgggccatggaccagctgctttcaagggacgtgcccgtcaggagggagggtggccagcccccaggcagccctgactgtgtgctcccctccaggctgaaactgccgccaaccggatctgtaaggtgctggctgtcaaccaagagaacgagcacctgatggaggactacgagaagctggccagcgacgtgagtgttcccccagtgaaagtcagggccacctcattatcctcagccagaggtcactgtgactcttgcagggggaaagcaggtgtggcagcgagatgacctagaaaaggctgcgtggtcacagaccatggcatttagccagctggtgtgtacacgacctctccgtttgcttccacaaggctaagggtcagaccggcagccaccttgccagccagcccctgggctcccgagcttgggttcctacagagatgctcagggacagtgtttcctgggcacctcagtgctttagaatcacctggggagctttgtgaaagcccctcttcccgtgccctggccctggagagagtgattcagaaggatggagaggggcctgggaaccaataggatagcaggccctgtgcaggtgcttaacgagcagcccagcaagacgggaactcggattatcctcctttccaagtgaggaaactgaggcccagggagggtcaggcacgtgcctgctgttacatgactagtgggacagagagctgggcttcacccaggcagccctgctctagagtccaaacccaatgcttcagttggaaataagggtggttagtacaactcttctggaggctcttcatttttgaaatctccatatttaaaaaataaacgtaggctgggcgcagtggctcacacctgtaatcgcagcattttgggaggccaaggcaggtggatcacttgaggtctggagttcaaaaccagcctggccaacatggtgaaaccttgtctctactgaaaatacaaaaattagccgggtgttgtggcacacacctgtagtcccagctacttgggaggctgaggcaggaggatcgcttgagcctgggaggcagaggttgcagtgagccaagattgcgccactgtactctagcctagcgacagagcaagactccattaaaataaaaataaaataaaataaaatttcccaaagagcagtggtttgactgctcatctagaaccagtggttcccagattttgcaatctcatagaccaggaaaatttgaaaaactattggatgtccaacctaagagggccagctttttattttgccaagttacggatgttttaaaaagaaacactaccatctgttaccaccagcacttctaacaccaagataaggtaaaaaggttattcttagaaccccagccattgccaagaaagggcagctggcagcacgcctcacaatgtatccacacagaggtatttctgtctttgaatttctcactttgccagaagttggcatttgggaaccacttctccagcttgtccgtgctggcagataactgattttgtacttctagaattgttttattatttttttgagatggagtttcactcttgtcacccaggctggagtgcaatggcacgaccttggctcactgcaacctctgcctcccaggttcaagcagttctcctgcctcagcctcccaagtagctgggattacaggcgcgcaccaccacgcccagctaatttttgtattttttttagtagagatggggtttcaccatgttggtcaggctgatcttgaactcctgacctcaggtgatccactcacctcagcctcccaaagtgctgggattacaggtgtgaaccagcgtgcctggcctagaattgttttagaatgtccaactgtttgttaccctttctcactccattaaagatctgagtagttcctaaaagaatatgtttgtttctttttcaattttattttctaatttatgtcccaggcccagtgcacatactggcctagccagactgagccaggtgggcttgtcggccttgcccttgaggcacttagtgagcccagaagcagtcaggctctcagcatggagctcagtgaagacagcggcagtggggcatgtgacagcatggaaagggacctttttggcgggggcatgggagtggaggtttcccctcttagacctgagggaaaagactaagagcaaaggcatgggccaggcatggtggctcacccctgtcatcccaccactttgggaggctaaagtgggattgcttgaagttcaggagctcaagaccagcctgggcagtatactgagacccccttctctataaaaacttaaaataaaaatcagccaggctcggaggtaggcacctgtagtcccaactacttgggagactgaggtggaaggatggcttcagcccgggaggttgctatgatcatgccacttcactccagcctgggtgacaaagcgtgaacctgtctttaaaaagaaaagcacaggcaggaacaggaagtaacaagagaacagtacagtgatgcagggacagggagggagcccacgctcccagagttccaggttgggggttctagcaggaatcgtggagaagttgggctggggagcaggggtaaccccctaaggtggggccctcaaagatccagatcccatgtgcccataagctggggggcagcccgtcagcactctgagggtcccccacaaaggccacgctggcttctgtggcccacagctcctggagtggatccggcgcaccatcccctggctggaggaccgtgtgccccaaaagactatccaggagatgcagcagaagctggaggacttccgcgactaccggcgtgtgcacaagccgcccaaggtgcaggagaagtgccagctggagatcaacttcaacacgctgcagaccaagctgcgcctcagcaaccggcccgccttcatgccctccgagggcaagatggtctcggtgagcaccaggattcacatgggagcagctgtgaggggcagaggcagccctagaactgcctgtgggcagtttggccagcgtaatctttcctaagttgttgatgtcctgtgggacatggcatggcctttcggatgcagtggtcggggaggggtgcacttcactcggcattgtgctcccctttggccctcactcactgtattttacacccagggttttatacgcatcccaaatccttgccacgggttgtgtgggtgtggagtggtgtgaatttggagccgtggtctgccatgatggcatgaccgccatgtgcttgaggcccttcatcagcggaggggcagtgcgccctggacggtaccacctccccatctatggtattcatccattcattcatgcactcacccgttcacgcattcattttgttaatccagaattgattgtacctgctgagtgctggggggccctgtgtaggcatccaggtataatagcaaagcatgacacagacatgaccccagccaagttctgccaccttcccatcagcatcccttggagacatccccctgggtgcctccacttccttgtgatagccctgcctgctcctgccctgccccaggacatcaacaatggctggcagcacttggagcaggctgagaagggctacgaggagtggctgctgaatgagatccgcaggctggagcggctcgaccacctggcagagaagttccggcagaaggcctccatccacgaggcctggactgacggtacggcccagctctgccccactctgcccagccccgctcccgtgctcccctcctgtctctcaggcatgcatgggtgtgcacacacagccccctgccacgttgggtctgtttctcaggtgccctttcttgctgcttgggagcatgtgtgtgtgtcagaaatgctgctttagagccaggttcagtggctcacacctgtaatcccagcactttggcaggccaaggcaggaggatcacttgagcccaagagtttgagaccagcctgggcaacatagcgagaccctgcctatacaaaaaaattttagaataataaaattagccaggcatagtggtgcacacctgtggtcccagctactttggaggctgaggtgggaggattgattgagccagggaggtcaaggctgcagtgagccgtgattgtaccactgcactccagcctgggtgacagagcaagaccctgtctcaaaaaaaaaggaaagaaatgctgctttggattccttcagccccagaaagcagggaccattcaggggccaggtcctctttgttgcccagtctgccctcgcctcagaggtgggaccctgtcagtcatccaggaacacagccaagccccctccagcacttcagggaagtgaccttacacccatctgtttgtcccctctgcgtgtcttccccatccagggcgagtgtgtggggcaggcctcttccatcccccgcaccctgtgttcagagtcggcttccctctcccacacctctgtgagcgtggacggaaggctggggagcccatgttcactggcacgtccctcaggctagaggagggcctgcctcctgggcctgctgccggaccacagccagtgctcaccctcagacagtgctcacccactgccttcggcccacccttcagcatggcccacctgtgagctcctcccacctcccatcccttcccagagcctccttcccgggcctggctccccctgcaggagcgccactgtgctttctgttctcggcagccctgcagctgcctggccgttggctccagatgtgggatttcatcacgtccctggccctcttttgggtcatgccaaggttgagatttcagatcccaggggtctggaagccttcagaaagctgccagtgcctgggagagccacaagagccactcacaggactcctctcccactctggccaccaccttcccaacacagtctccctggccctccggccgccactccgcccagctgagcccttccttgcattcctgagtgcattttctcacccctccccaccctggcccgcatgcgagtgtgcagctccacacggcctgcagccctggccacggcccagcttgtgccctcctcacatgagctcagctcgccattcccgcggcagctgccagcctcagagcagcccagcccctttgctaccaggaaagagtgcgagtgagagagtggatagtgagggaggaagggcctggccaggccgggtgccgcacttccctcttgcctggcagaaaggcacccatgtgaggagagcgtgttagcaccgatgccatcttgtgtggttggtggcctccatccattcccggattcactcattcgttcaacagacagctcaggtggctccagccgtccttatccatggaggcctgggcgtcgccctgtggctgaaccttctgggggtctttctgcccacccatcagctcttcagtccctctacagggctccatgaggccctgcagatggtttcctgaggccaaggggctgggtgtggtggccccactggcattcctcccctgggaagggctctggggcagccttcacctgaggtgtttagaagccagctcagtctccggccagggcccagctggttcagcggcctccacacgtccctgccccacccctacctgactgggcatccacgcgggtctgcccatggcgtctgccagagcccccaggcaggctggcctactaattcccaagactcagagcctctgtcctctcaagtagcagttacgtgaaacaggacaggcaggccctccacaccccagggtctggtcgtagcggcctcctccgccctggggtgggtgggccaccttcactccacacccctcaccatcccccacagcccgcagcgggagggtcgtcgtggatgcttctctgagggacttgatttcctgggaatacgaccaaccccgaacgaccccttgtccccactccagttgtcccttggcctggatcccagatagctgtggcaatggtccgctgcccacatcctctcggtgcacccttgccaggactctgcggaggcagagggagatgtcacctgctgtttctggttcctgcccctgggagaaagcagttggagaagggaattgcaaggccgccttgtggctgagcctcctgccccagggctgcgcagcagggccggtggagccagagtctcccaggcctcccacttcttggccatcagtgccagagccgatcctgtggggagtctggtaggtgcctgacagttgagactgggagaggctgaggtgaggctggtactggctccatgcctgctgtgctcgaacaccacctcactgaaacttgagaatagttccatgccacacaggtactggggctggccccattttacagatgaaggcacaggcccagagaggcctcggtggctgcactgggcgggcagctgtcaggtgctgggacagagctgaggggatctccgctaccacttgggggaagcccaaggtggtgtgcctgaggcagggcccctgtaggagctggggtgcagccaccttcccaggctggcattttccctgcggttccctaaagaccttcacttgcttgcagggcttccttgagctttggttctgggatgtgtaattagccaggatcagggactaataacagcgttcctcctttcctttaaagggcctgatggtgggcccgccccaatgcacacaggacaccttaggacagcgtggggcacttagacgtggagaggaccaccacctgtgcgggtgcagggtcagggtcctagaagaagctggctctgatgcttccccttccccaagcctgctgggacatgggctttgaccccgggtgcttctccggatcaaagccctccagaaacaggtgctacctttctaagccgtgctaccacggcccgatttgtatggtttcctactaacaaaagttgctaagtttaggacacacaggttgagatggaatctctctctcaggctgagcaaccctgaagtgtccatccaggtccatccaggttacagttgggcttagagatccctggagggtacggaagaagattctggaagtttccatgccactgtcattggcatggaaggatgtggggtccacagtctctctttccctccctctgcttggacagcccctccagactcctgccccacagctgccgtgctgtggtctaagcgtctctctgctcctaccagggaaggaagccatgctgaagcaccgggactacgagacggccacactatcggacatcaaagccctcattcgcaagcacgaggccttcgagagcgacctggctgcgcaccaggaccgcgtggagcagatcgccgccattgcccaggagctcaagtacgtgcgggctcaggacactatcatcacctggctctcaccacagcctgcccagactggtggcggcagcacgccgaggcccagcctgcctcaaggcctggaatagggtccccagtgccccaactgcacctccttccagaagccagggaagggccttatgggatgaggccttttgcccatcctgtctcagccccaggtgggacacctgaaggatttggattctctagcaggagggaggtgtctggccccttgtcttgattcttcaggctttaggggtccctgggggtgtcacctctcctggccaccccaagtaggccctggtcccctgatgggatgggccccagcctccgttgctcccagccataggtccctgagggaaccaggctgcacagtgagcctattgttctgctcggccccttccctttcttgctcagaatacacttattgtaagagcttccaggcagccgggctccttcccctccccacccagtcagataaacttgtgtacacaattagtacgctgagggtcgcgctggtgaatggggccttattccaccagtgcagcggccagcagcagggcgggcccaggcagcaggaggcccaggccattacttcatggaaaatccacaggccctcgaggggcagcagggctcccaaaatagccatctgctcaaaaataggatccttggctataactgctctttccaccgacacccccaccccaccacagtcacccccaaaggtctgcttattcctatgagtccaaggcccgtttattcctgagtccaaggcccagccctgatgccccagtggagccccatgctgggcagagctggtttcctccccgactcactacccactactgtccgggtgctttgagggttccccattggctcagccagaggcaagagtcccgtggggccatcacagcatttggcacagttggggcactccaggggtcctgccaccaccacgtccaggccaaggagagcaaggtcacagatgcagcaccctcgggggtgtgggggtgggacacaggcagcttccccagtgacggaagagcccctggaagctggtaggaaacagacttgaaataaaccctaggcttgcccccttctcaggccctgggcaaagctatgtgaaacccattactctgctcaggaacaggcggtccccgaagcagctctctggacggtagccctgaaggaacggaagggagggctgtccgggtcctgtcttttctgctgagggggaattacagaggcctgtggaccgtccaggatgagccggatgggcagccctgctgagcactgattaatggcgatagcaaaaactcactgagctctcagggctttatgtgtaccagctcatttaatccccacagcaactgtgtaactgagggaaccgaggcacagagaggccaagaggtttgcccagggtcacacagcaagggagtggttgagatgggaatggagcccaggcccccagccctactgtggagcacagcctcagcccctgtccgctgtctgtggctggctcgcctgctccccatgtcctgttcctccccagagtcgttccctgccccctacccctcctcaggccccaaggcctggttgaagggccacactcttagctgatagtggcagaatgagtcagggatgggtgagcaggaggaagccgcttcccttctcacccctggttatcacctgttaaccagctctgttatcaccccttcccttctaccctgggggtcccatgggccagaaccaagctgtgatttgattgaccaattagtgattggttgctgatatcctggaatgttgactgccccaacaccctggcctgggaaccttgggggtagatgggtccaatccatctagccacttgcccttgccgagtctcattgctctctgcccggcccgcagcgagctggattactacgactcccacaatgtcaacacccggtgccagaagatctgtgaccagtgggacgccctcggctctctgacacatagtcgcagggaagccctggaggtgaggagggggtgacatcacccacggagctctgtgcccctgctgccccggggctggtggtgtggatagtgtccagacctgtgagctccccccacctcccacggagaggatgttctctgactcctcagggccctctggacccctccccacccctcctgctcacatactgacctgccttccctctgtccctgcccccttccctcccacacactagaaaacagagaagcagctggaggccatcgaccagctgcacctggaatacgccaagcgcgcggcccccttcaacaactggatggagagcgccatggaggacctccaggacatgttcatcgtccataccatcgaggagattgaggttcgcaccccccggccccccatcttcccaagagcctctgtggggctgggccgccccctcactccagctcctcccctagggcctgatctcagcccatgaccagttcaagtccaccctgccggacgccgatagggagcgcgaggccatcctggccatccacaaggaggcccagaggatcgctgagagcaaccacatcaagctgtcgggcagcaacccctacaccaccgtcaccccgcaaatcatcaactccaagtgggagaaggtgggccggggccatccgtaggggctggggcaggacggcggggctgggggccacctccctgaccgctcccacaccgcgtctcctctgccaggtgcagcagctggtgccaaaacgggaccatgccctcctggaggagcagagcaagcagcagtccaacgagcacctgcgccgccagttcgccagccaggccaatgttgtggggccctggatccagaccaagatggaggtgaggcacggctgagccccacagagctgagaaggttccaagagagctcccgtagtgagggggtccccggccagcccagggcctgcagactgaggcgcctggcagagcaggtcccaattctcaccacccaggggccgtgatcaccctgcggggttaggagagtccacagagcttgcgcctggaatcccggcacctggggaggctgaggcgggcggatcgcttgagcccaggagttcgagaccagcctgggcaacatagtgagaccccaactctacaaaaaatacaaaaattagctgggcatgatggtgcgcagcccaaggaggtcgaggctgccgtgagctacgatcatgccactgcacttcagcctgacagcgagaccctgtggtctctagtgggctacctatgggaggtgggtttgatccctgaatgccctggtctgatgattgtgagactcaggcactattgaacctctgatcctgtcctcccagctctaaaatggggatgaaaacagttaccttattacttcaacaaatgctttttgcaccaactaaccagccacatgagtgctgtcattcttacagcagttctgaccaccactcactgagcactcactacataccaggcaaccaggctggcagcaggcaacctcgtttaaacccagcaagcctgagagggggtccgggtgccaggcaggtcagccctgaggttcatgccagccacgcagcatgtggacttgtgggtgccgagacatggagtgcccgaggtcaggagctgcagccaggccagggttcagatcccaactctgcctctaacagcactgagctgtcctccgtgagcctcggtttctacctctgcagtcagggcctgccacagccctggcctcacagagaggtcaagggtaaaatgaagttgggcacagggagcgcttggcagagaaaacctccctgtcattgtcatagctgctttaacatgagagggcaggaccggaggggacagttgtgagcagtgggccttccctcccagggacccatgggccaaggccccaggccaaaggggccccggggaagatgcaggccagcagcgcgagtgggctcctccaggtggtcagtgggggcaggcccaccagcctcaccccaccgcctgcacccacccccgtaggagatcgggcgcatctccattgagatgaacgggaccctggaggaccagctgagccacctgaagcagtatgaacgcagcatcgtggactacaagcccaacctggacctgctggagcagcagcaccagctcatccaggaggccctcatcttcgacaacaagcacaccaactataccatggaggtgcgcggctgccccgcccgctggcctttccaccagcatggccggcttcctcactggaaatggttcgggccagtgagaagatagctgtctgctgtctgttgtttttcactctgtttaaaaattattgaagagaccagcactttgggaggccaagtgggaggatggcttgagcccaggagttcaagaccagcctgggcaacatagcaagaccctgtctctacaaaaaatgaaaatattagccaggcatggtggtgcatgcctatagtcccagctccccaggaggttgaggtgggcagattgcttgagccagggaggcagaggttgaggtgagccgaggtcatgccaccacacttcggtctgggtgacagagccagactctgtctcaaaaaaaaaaaaaaaaaagattgaaaagactagatcaaaatgtttagacatttttaaaaattacactttccctagcactgctctcatcaccatgacaatgcccctcacaggacaagctgttctaggggcccacagagggcaccgtttgccctgtggccttagcagtatcagccttgctcagggccagagccagccagcgggtgccgggtcagggcagcagctcccactggctaacactccggggacattacaagctggtcgccgtcatattggtagcttgagaaaccaaaagactggacactcttgatccaacccatacaggtccacagatgcttcaaaccagagttggcttttttgtttttttcccctgagagccagtggtgagacactgaccagagtttgtccaaacagtctccacagggatcccggcacaagattcatgggtccttgcccttctgctgcccctgtagctgggaaacacacttactgtggagacagacattggcagaggcagcagggaggcaccatggcccgtgtcccctgtgaggtgtacaggagagcaggggctttccccagggcgggaggacagttcacagtcctccacgtgtgaaccacggtgaggacagttcacagcacccggcccacgatcacgcccccgtctttccgcagcacatccgcgtgggctgggagcagctgctcaccaccattgcccgcaccatcaacgaggtggagaaccagatcctcacccgcgacgccaagggcatcagccaggagcagatgcaggagttccgggcgtccttcaaccacttcgacaaggtgagcagcctgccacctcctcggcctctcccctcccgccgttgccgtaccagcccacaccttcgtctctgcatctgttcgtccattcccatcacagttgctgagcgtcggccgccactcccagggccagcagggccctgccactgtcagggtgtaggtgtgcggcaccaagaccccagcctgggccacttcacacgcacaggcagggggccggaggtcccaagtcctgccttctggggtggcatcctcaccacccccagggcagatgaagtctcagcacacccaggctttgcgacccggtctgtgaacctggacacagacaccccgcacagtgcttttagaattcagatttggtccggcagcctcatcagaggggccctgagcgccagagtttgctgccatccccagcccacccctgccgggctgacggactgagaagtgtgcagcctcagctctgcacctggcgcccccaggacaggatacagtcccctctgtcccactccaaatcccaaaggcaaggagaaccccccccccgaccctccaccagtcctgggacttgtcctcagttctgtagcatccagctgccacccctgctgtgggcagagaggtcggggaggcctctgccttcctttgagcttccgaggttggggaaaggatgaaaggggcccgtgccgcccccgaccccacgtgtccctggccatctccttgtccatgttgcctctaactctgtgtttccctcccctacgtgtcccttccccctgccctctgcatgtgaccccgatccctcatcctggtctccacgccgcccctcccgcacacctgccttcggatggccccggcaggatcatggcggggcgctggggcccgaggagttcaaggcctgcctcatcagcctgggctacgacgtggagaacgaccggcaggtactgcaccctgggccccagcggaccatggcattaactgctctctctctctctctccttctctctttctcccctcgccatcccacccctgccatcctgtgtgccatctcatggctctcttgcctccctgcccacatctccctggaccccttcccttttacctggtctcttggggccgctgtctccctgctccccgccactgtcctgtctgcctgctgtgcacatggggcggcccctcttgcctactctgggcccggcctcctctgctatgcctgcgtcctcggagcagaagcagacaggcagcatggactccgatgacttcagggctctgcttatctccacaggatacagcctggtatgcagctctgtctccccagccacccgctcctcctcctcctcctcctcctcctcctcctcctcctcccccccacctctccccctcaccgcctccagagcttcctcgtcctcggggacactcctccgcccgagcagcgcagccgtgcctgcctcttcctctgctgcatctgccggggtggggtccctccgatgacttcccgagccccccttcttccctagaagtctccagaaagagggggcagctctcccactctctcccctttttctttctctttctctctttcttccccatcctccagagcttactcgtgagcctgggctgagggcagtagaccccagttccctgctgtgggagaccacgagaggggagggtgcagagaggccctgcttcccggcctggggcactgggggcttggaggcctgggtcagctggagcagtggcaggctctgcccggggccaaggctgctggagcaggcggggaacagggcgcacgcacacgtgggttgggccctactctctcggctgtttccctggagaccccaccagtgtgggcctggctgcccctgccccactaaatgtcgggtgtcccccaccccaccctctccttgcagggtgaggccgagttcaaccgcatcatgagcctggtcgaccccaaccatagcggccttgtgaccttccaagccttcatcgacttcatgtcgcgggagaccaccgacacggacacggctgaccaggtcatcgcttccttcaaggtcttagcaggggacaaggtgagcgagacccctacgaggtgcatgggggctggcgagaggggtccctgcagtgggaggggctgagggggccagtgtgtgggtggggatggctcagagtcccatcctgcctgccccagaacttcatcacagctgaggagctgcggagagagctgccccccgaccaggccgagtactgcatcgcccgcatggcgccataccagggccctgacgccgtgcccggtgccctcgactacaagtccttctccacggccttgtatggcgagagcgacctgtgaggccccagagacctgacccaacacccccgacggcctccaggaggggcctgggcagccccacagtcccattcctccactctgtatctatgcaaagcactctctgcagtcctccggggtgggtgggtgggcagggaggggctggggcaggctctctcctctctctctttgtgggttggccaggaggttcccccgaccaggttggggagacttggggccagcgcttctggtctggtaaatatgtatgatgtgttgtgcttttttaaccaaggaggggccagtggattcccacagcacaaccggtcccttccatgccctgggatgcctcaccacacccaggtctcttcctttgctctgaggtcccttcaaggcctccccaatccaggccaaagccccatgtgccttgtccaggaactgcctgggccatgcgaggggccagcagagggcgccaccaccacctgacggctggggacccacccagcccctctcccctctctgctccagactcacttgccattgccaggagatggccccaacaagcaccccgcttttgcagcagaggagctgagttggcagaccgggcccccctgaaccgcaccccatcccaccagccccggccttgctttgtctggcctcacgtgtctcagattttctaagaaccaaaaaaaaaaaaggaaaaaaaacacaaaacaacaaaaaccaaaaaaaaaaaaaatcacaaaaacaaaaaaactataaaaaagaaagaattaaaaactttcagagaattactatttactttattaacttacggatttattatataaatatatattcacctagcaacatatctctgccgtctctcctgctctcataatgaagacatagccgattctctgcccgggccccttgctgatgctcctccgggtctgcgtcgggcgtgggtctctggggaccctccagaggtggaggtgggctgatggcctggctgcctggtggttgatggttttgctccccctaccttttttttttgagtttattctgattgattttttttcttggtttctggataaaccaccctctggggacaggataataaaacatgtaatatttttaagaaggattcctgcagcatcatctttttttatttctcctgtgtctgtcctccaccttctaggagagccagggcagagctagcactgtcttaagctgtcaacgtggactagctcgtgtcatctgctcgagaagggctgtcgctgttcttgtttctgagtgaggagtacgcaggccagagtggtcacccggccgtgagcagtgagggccagagactagccccagacaggtggatgccagagagagtggcacccatgccaggcaaggcctagggaggtggtcttgctcagcaaccctgccctgagcagcaggtgcgcccatccggagatcctaggagaaggtggccacctccatccactaaggaagagaaggaagacagtggcttgaggcagggagctcgcaggacagagcctgagccaccctgtccctcccacctggctcacctgtctgtgggtcaggcagatgaccccctcacccccatccaggtgctggctgcagtggcctgtgcagagaggggcagggtgagtgcccaccagtccccgtaccccttccccccatgccccaccatgccggggtggtactcacagaagatgcaggtgaggtgggccacacaggacacgaaccgctcgaagtccacacgcagacggctatcccggtagcggctggtgagggtctgggtcagctggttgttcaggtggaagcctagggggaggctgcttctgagcccagtggcccacagggaacccaccttggcattgcatccccaccccacctcctcagggaggacatgaatgccacagggtgtcacaccccaactctgccccatcccggcagggtgagtacaggctgatcccttcaatcctctgggcctgtttcctcatccatcaaacggactaagacagccccgaccccatagggtgtgtgaagacagaacgctcaggacagcgtctgacacgtgactcgatgtgtgggtactgttactccttaaatcctgtggggctttctccttgccagtgggcactggaggatatttctgtgcagcaaaaaatatagtcaatcccatatggagtcagtttccttacagtctacctcagaggcgatttctaaagctgagaaaccatgtctgctgtggagtctcattggaggcttttaaaaacccaaaacaatgggttcttgaccccttctgagatgcaaggttgtgcctgatgacctttgtctcccacacggccagacaaacccagttccaagtaccgtttcatgggcttctgctgcttccaaagcccatcttcacccccattctgtgtgttcattctcttcacaaatatctaccaagtaagtgccatttcatgctgtgcccagtgccaggtgctgttttaacaggagggcaggtggcctgcagcctcttcctgcccgtgtgacctgccccaggtcactccctctggcattcatctgccctcgggcataggggtggaggctgccatgcccagggctatggggaaacccagccagatggggtggaaggacccgagaaggcgctggagcccctcagctgccactgcaggagttcccgtttgagaaattctcaagggcactttatcagtttccttcttcctggaataactcctggcatgtaacaggcactcactggtgccagatgcgtgaacacaagcctgccacctgccacctgctgtgagtccttgctccctcacctccactcctgtctatctccggcccagcctctccctctctgccccacgtctcccaatccttggctgtctctgaccccatttctccccctttgacttgggctttttcttttttcttttttgagacggagtctcgctctgttgcccaggctggagtacaatggcatgatcttggctcactgcaacctccacctcccgggttcaagagattctcctgtctcagcctcccaagtagctgggattacaggcacgcaccaccacgcctggctaatttttgtagttttagtagagacgggggttccgccatgttgcccaggctggtcttgaactcctaggctcaagcaatctggcaatctgcctgccttagcctcccaaagtgctggcattacaggcgtgagccaccacgcccggctggctcttttggacacttgaccaccttctctgggtctcacactcacagccacacccaaaccctctccctctggctctccgactccatcacagtcaccccagcccccatctccctgtggctccatctgctgtgtggtggcagacaggccccagagtggggttggggatctgggaactccaagttctgaccccagcccactctccaaatcccctccacatgagggtcacagtgctgtactgtctcatctgccttggagcccatggaaagcctttctctctggctctctttcttggttaggatgttgtgctgggcttgttccagctcatcaggaggaactcagcctagtagcagaggccattggccggctctctttggggcttttggtaatgaaagctgcattctccaatcactaagtgctatgccctgcagtgcatggacgactcctcaccaccctgtgtactagctttttttttttttttttgagaggcaggctcttgctctgtcacccaggcacaatcacggctcactgcagcctcagcctcccgggctcaagccatcctcaagcctcagcctcctgagtagctgggaccataggtgtgagccaccacaccaggccctggccattttagagaggaaaatggaggctcaaagagatgaagtcaagtgcccagggcccctcctggagtcagtagagtgaggattccaaccccggtgcaccagaatccagaacattctaccatgctgccctgggggccagaccctctcagataccagctcctaatcttccccttcctggaggggcctctccctgccccagaacccctaccaggcacatccccctttcatgtcctccccaccccacacacgccccttgcccttctccttccttatttggcctctttcagggtcacccaacccctgccagggactggcaacaagctaaggtgtgggcctgtggatggccacagtgcagacggccacagctgagcagggggacttggagacaatgggatgggagagaacaggtcctgtccccacgaccaccccaggaccctgtccacacctgctgcattcagtgccagcctcagctcgtaggagttcatggttccagaggtgtcctcatcgaacttgttaaatatggcctgggcaggaaggatgagtcagggctgccctccatgccctgaagagggctgccaatggggcctcccaggcaagacagcctggtgcccatcccaactccctttcttctggtgtggacccccagcaagcagcctagccacttgggacttctgtttcccaatctgtaaaatgggaataagagcaatgacccagaggacaagctgaggctgggtgggggcagggatatcccagccagatctctccaagtcagcctagtccagtaccccctcgttccctggggacctgatagcccacagggtgcctatgtctctgttagtaaaggtttctctctttctgggaagaggcccagtctcccacctcacctgccactccaggaggtagccccagagctgctggaagtggtgtaaggccaggctttgcccatgctgtgttgggggtcgggggcatctggttaaggtcaatctctccagaaggggaggagagaccccaacgtccccttccccactccctccctcacccaggcactgccccccatgtaccccgaaacactgcagcagctgctcacaggtcctgagcccgatctctctgggggtggaggtatgggccctggctacaggaaaaacaaagtcaaaccacagcacttcctgcattctggccaccactttaagggctgggtggatgtgactcccttaagcaggtgatgttgtcagtcccatattatagaagccgaggcacagggagccagtgactgctgcgcctagcagagctgggattcaaatccaggcagggggtgcccagtctgtgctcaaggcagccttgcctttcagcggaaggggagcttgcgagcagccgtggcccaggtcacggggcccacacaagatcccctgcagggagatgctgccaggctgagccctggcttcctgagcccaactcccagcagcgcggtgggttcatagacatagggtggcaccggctctggttgcaggacccctggctaagacccctcctcctgcccctatcccagccaactcaccaggctccagggcaatgcttagtaaggcctggagctgagaggcattgagttcttcctcctagtccaggaaagagggcttgtgaggccatttactcatccagctgctctgggccaagccctgtgctagggacacggcaggggctgacagagcctcagagccctagctccaggagtgggggagacagacctgtccccacagggccagggctgtgacgggggaagcactgggctgtggttgctggtggggggccagcagaccggcctggggcaggggggtggtcagggagagcttccagggctgggcaccttagatgagacctgagcctggctggaggtgtcaggagggagagggtggtcctgggagagggtatggactgagcccaaggccctgaggcagggaggagctgtgagcatttcaagaaaaggtcaggagatttaagcccggagggaggaaaaagcaagcaaaatgagacacctgagatgctggggtgggggaaggggggtccccaaggggaggccgcagcgggataccccctcagtccaatccccctcctcacctctccagccagctcctgaaacagctgctccaaccccagctccaggggcaggtaggggccctgccgcatggcggaagtttagcgctggccaagatccccgccccatgccgcccctccaggaacagtccccacctggagagactgcaggtctgcgctgatcacgtcgtcgatctccctgcaaattacagatgggaagtggggagggggctgtttgccccagctggggctgtgtgggacggggtctcaggtgaggaatcgcgtggggtctaggtagggaccgtggagccctgggctcatcctcgcggggcgggggttctgggggcggggcgggggttctgggggcggggcgggggttctgggggcggggcgggggttctgggggcggggcgggggttctgggggcggggcggggcgggggttctgggggcggggcggggcgggggttctgggggcggggcgggggttctgggggcggggcggggcggggcggtggttctgcgggcggggcggggcggggcggggcggggcgggggttctgggggcggggcggggcggggcgggggttctgggggcggggcggggcgggggttctgggggcggggcggggcggggcaggggttctgggggcggggcaggtcaggtctcgggggtctcgggggtctcgggggtctcgggggtctcgggggtctcggggcctgtctaggcagggatggggtcggatttgggtgcccggggctcacacggccgtgtggcggcgctcggagaagacacgcagagtgaagtcagcctcgtcgccggcgtgggcggtgctcggcaccaccaggtagtggcctggacgcaggcagcagcggcgggtcacgtcgcggcgggcgctgaggggcgagcggtcggcgcgcagcagccggggcaggagcgcatggctgcgcggggaatcccagaggcccagcagctggggacggggcggcatgaccacggaccaggctcacccccggcccttcatccccgcaccctccagcgcgccccgtccaccctgcctaacccctgtccacgcctcccctgcccccggacccggctctgcccccccacccccagggcagtttgaccaagccccagggcaggttgaccaagccccagggcaggttgaccaagccccagggccggttgaccccatcccagactcacctcctctggaatctgaaagaagcaagagcaaggggcgtcggggcaggggagaggtggccgccgctcagggtctcctccctgccccttctcacctctgtgctctctccctccttcttcgtcctattagacccttattgaacctttgccccgcagtccccgacccaggccctcgccgacccctccccaactcttccttccccatctgcgctcccagcgccttctctgtatccttggtcccctctggcccttctaacccccagcctctctctgtccctaacctcgtccctctgtctgtccctgagcccctccctctcattcccttagctccctctcccctctgagacctggccccccagccctactagccccctactcccctcccagcgccgccccctcttggccctgctcctccactcctcccctcctccccgatcctcttcagtcccacccctccaccactccccctcttcccccttggccccgccctccacacctcccctcttcccactggccccgcccctccatgcctcccccgctccttggcccggccccgcccctccaccctccgggttccctccagcctcagctttgcccaggacctcacctggaacacgtggaagccaacggtgaggtaagtgaggcccttggctctcaggcgccgccggttgcgctggatgagggacagaaggaccgtgcacttgggcgtgcggcccccccgcgctgggccccgtgcccctgcagccccccagcccccccagggcccttcctcatcctcgtcatcctcctcatcaggctccagcagcgttaaacggaactgaggattggtccagaaggtttctaagggaggaggaaaaaagggggtttcctagccggccacagcgccccccaccccaggaagcctctcagggcccctcaggcctcaccagcattaggctggctcccgccggagttgaagccacgcacccagcggccttggaaggtgtggacgtgccagccgcccccctccgggctggggcccagcacctccgggctcagcgagcagatctgcacggtgtcgaaatggaggaggaagtcccgcagctccatcctgcacggtggcccagtcagaccctgcccggccccacctcgagggggtcccaagatcccggaaatgactcccagatcccaaagcccctcacatttcttaaatattgtcaaatacccttcaggctccagaaatgaaccccaaatgcctgggcctctagctctgccaaattcctccaagtcctcagacatgccccacaaatcgccaagattcacaagctgcccccaaatatcgttaaattgccaccaacccccaaatagcaagaccctcagactctaaattaccaacaagtacccttcagcccctcaacattgccaaatctcaagaaatgccccaaatatcaccaagccttcctccattgccctaaatactgcccatccctttcaatcctccacagataactaggccttcaaattcccctcatattactacttttttaaacccactccaatcagaggttctctaatattactaccaattcttccttgatttcccaaaatagaacctggccccaaaattaccaccgatgtacacagtttctccctattaggacccatccttcaactggggctcgccctccctgaaccccttggcagagaccctcccagaggcagagctgggaccctgacgaactgaccagaactcgccatcctcctttttcaccagcagggcatcgcggcactcggtggggagtgtgtcccagcgtgggcagctggagagactgtggtgtgaggggcgggcaggtggggtccagccccacacccaccccagacccatcccacctgtcgctccaggcccccgtccactccacgcagccccatgggttccgcagccgcagcagccgcaccttggtgaagcccaggaacacctggggcagcatcgtcagtgggggtgatgcctggacatggcctgccaccccacccatgggggacacttaccttgtgtgtgcccgtgatggaatacgcgtgtccctttaccaggccctcttctgtgcggtactcaccccgatcactctgggcaggggatgggatggtgaggccaaggtaggggacaggagggcagctgctcctccctgcccccaacctcctgccaccaaggcaggagccaaccagagcactgaactgaatggcacgcagctcagagaccatgtcagggttagtgactgaaggcgaaagagaaaaggagaggaagggagatggaaacgagacaaaaggagatggaggtacgggctcacgcctgtaatcccagcacttagggaggtcgaggtggaaggactacttgaggccaggagtccaagaccagcctgggcaacatagcaagaccccaagtctacaaaaattttaaaaattcaacaggcgtggtggtgcacaccagtggtcccagctactctggaggctgaggcaggaggatcccttgagcccagaggtcaaggctatagtgagctatgatgacactactgcactctggcctgggtgacagagtgagatgagaccctgcctccaaaaacaaaaacaaacaaaatagatggaaagaggcctgttgtggtggctcacacctgtaatcccagcactttgggaggccgaggcgggcagatcacaaggtcaggagattgagaccatcctggctaacacagtgaaaccccatctctactaaaaatacaaaaaactagctgggcatggtggcgggcgcctgtagtcccagctactcgggaggcaaagcaggagaattgcttgaacttgggtgacagaggttacagtgagccaaggtcgtgccactgcactccagcctgggtgacagagcaagattccgtctcaaaaaaaaaaaaaaaaaaaaaaaagatggaaagagtagagagacagagacagagacaaagaaagatacagaagagagaaacagacacaaaagaaaaagagaagcagtaactcagaggatttaagtaaatgaatgagtgaaggagttagaccaactcagtgaatgaatgagtgtgtcatggggtcacagatgaacacatgacccaagctaagcccacgagaatcaatcctgggacttttactgaaattctcagaaagaggcactttttttttttttttttaaataaaccctagggtggtaggagatacctgcagctatgggggatccttttatgcccatgaggggagagcctggctgagagtgacactaacacagaatgagaaataaacatagttgcaacaccctcagcatctggatccagctgtgcctgaagcccctgattcatgagagcaaatgaatttatttttgactagttagatttatgagcgagcctaagccagtaacggaagcagagaacagaggaagcactccgcccaccccaccacacccctgactgtgctctggtcctggtgggggttccgcatgcgagtccaggtctcttaccagggcagtggcgcccacgagggactccttggccagggcatggcgcagggcagagaacagccccatgctgttttgtctcagatagagcacctcgcccacgccgcctgtgaaatccacaaaagcctcattcatgtggccgccccgcatcacctcataggagccgtggagcctgtgggggcagatctggggtgagggttgaggcaagtacaagcgtctcaggcacccctgccctgggatctgcaggggcctgtgtctcagggtgtggaatccccaggggaaattcctgaagttttgagactttttccagggtcaccctgtggcccaggccggagtgcagtggcgtgatctcatctcactgtagcctcaaactcccgggttcaagcgatcctcctcccacctcagcctcccgaggagctgggcccacaggtgcacaccaccacacccagctaaaacaatttcagactcttggccaggcatggtggctcacgcctgtaatcccagcgctttgggaagccgaggcaagtggatcacctgaggtcaggagtttgagaccagcctggccaatacggtgaaaccccgtctctactaaaaatacaaaaattagctgggcgtggtggcacatgcctgtaatcccagctactcgggaggctgaggcaggagaatcgcttgaactcgggaggcgaaggttgcagtgagccaagatcacgccattgcactgtagcctgggcaacaagagtgaaactccatctcaaaaaaaaaaaaaaaattcagactcttgacggggggaactgtggcacatacagaagcccttggagattgggcctgtggtccttggggtgaccaggacttcggtttggtggggggcatgggagagctgtgttagaattctgagagtcctggtgctgtctgaaaccttgaacctctggtagatgtccgctttgggggatcatccctatgggggcttgtcaggaatttcagagcctcagaatggggaaaaggcaaagatttgagggtcccagggtgacccccaatattttgggggtgctttagatttctcaatggaccaggagagacaatctaagatatacagctcacccgaggggataaatcccagatttggtgaatccagggcctgatatatgagatttcaggatccttaagaattatgagtgactgggggtctccaggaatgttttgtgtgaaatattgatggagagaggggtttaagatttgaaggtacagctgagcacagtggctcacacctgtaatcccagtactttgggaggccaaggaaggtggatcacctgagatcaggagttggagaccagcctgaccaacatggtgaaaccccatctctactaaaaatataaaaattagccaggcatggtggtgcgctcctgtaatcccagctagtcgggaggctgagacaggagaatcgctggaacctgggaggcagaggttgcagtgagccaagatcgcgctactgcactccagcctgggcgacagagtgagtgagactccgtctcaaaaaaaaagaaaaaaaaaaaaaacatgaagttgctcaggtgatgttgtgatatgagggttctggcggttgtcacttggtttgggattcttggtggggtgtttggaggattgcagagcttgggggactctgggtccccctgtggcttgatgcctgctgtggggacttagggctgcagctggttggaactggggtcctcacttggcgtaggccttctccaggagtggggcccagaactcattccgctgttccgagcgcacgaacatcagcttcccctcacgcacgggcagcctgtcatccaccacgacgtccatccagcggccaaactgccagagctggtgggagaagatgcagggccggactcggcttccaacctccaaccctgcctgggccctgcctctgctgtgccagtcccagagtcaggaattacagccccaagtcaacgttaactatgaaatccatatggctggccgggtgcggtggctcacatctgtaatcccagcactttgggaggccgaggcggatggatcacgaggtcaggaattcgagaccagcctggctaagatggtgaaataccatctctactaaaaataagaaaaaattagctgggcatgatggcgggtgcctgtaatcccagctactcaggaggctgaggcagagaattgcttgaacctgggggcggggcgaaggttgcagtgagccgagattgtgccactgcactccagcctggatgacagagtgagattccatctcaaaaaaaaaaaaaaagaaaaatccatatcaccaagtcaccatgggggaaacggaggcatgggcagaggaactgagctgtacctggaagtggaagacgcctgcgtagccatgctggaaatcctgtccaggagggaccacccggcgcaggagccggggatacagagtaagggaggcggcagctgcaaggaaccagcagttacctgggaggagaggccaggattaggtgaggatggaaggagggaggcctggtgcggtggctcatgcctctaatcccagcactttgggaggccaaggcagaaagatcacgtgagcctaggagttcaagaccagcctggccaacatggcaagactccactacaagaaaatttaaaaattagctgggcatggtggcatgcacctgtagtcccagctacttgggaggctgaggcaggaagattgcttgagtccaggaggttaaggctgcagtgagctatgatggtgccactgtattccagaatgggtgacagagtgagaccccatctcaaaaaaaaaaaaaaaaaaaaaaggaaggaaggaaggagggaggagggagagagaggcctagggagagaagagactgaggagggatccaggggccgggagtgggtggacaaagggatggagctgtcaggatctcagctgaaactagctggatctgaggactccaggtgggttcagggtctcacccaggctcccctgacacacgtctgtgcggctcatgtcttcacagatgaacttcggctcagcacagaactcctgtgggtggtgggggattccaggcctcagcctgagaaagcgaggaaaggtctcatccagaggagtgagggcctccaagcccatgaaaggcctggaagcctgtgggcaggagcatggcttccctgggtctccagaagttgtgctgagccagtcccatggtagccccctcctccctcagacccgggagtccaggcccagcccctcctccctcagacccaggagtccatgtcccgagcccctcctccctcagacccaggagtccaggcccagcccctcctccctcagacccaggagtccaggtcccgagcccctcctccctcagacccaggagtccaggcccagcccctcctccctcagacccaggagtccaggtcccgagcccctcctccctcagacccaagaatccaggtccccagcccctcctccctcagacccaggagtccaggtccagcccctcctccctcagaccccggagtccaggtccccagccccctcttccctcagacccaggtgtccaggccttggcctctcctccctcagatccagaagtccaggtccaagccccctcctccctcagacccaggagtccaggtccccagcccctcctccctcagacccaagagtccaggcccagcccttcctccctcagacccaggagtccaggcccagcccctcctccctcagacctaagagtccaggtctcgagcccctcctccctcagaccagggagtccaggcccccagccttccttcctcagacccaggagtccatgcctccagcccctcctccctcagaccccagagcccagaccccagccacactttacatggggcctcatccatttcacgcctttggccttctccgagtccggccccagctggtcatagccaagggcatcagggccagcagggaagtaagggtcgcggaacaggatccccgaatccaggcaggctgcccgaattgcctcatagctctggccccgaaaaagctgcaggcgcccggctccgaccccagcctcctcatccacgagctggatggtgaccctcccactgctggatgccatctggacactggcctcacaagccggcaccaggccctttaacctcctgagtcacgggggcggggcctctcttccattggagccccagtggggtctttaggcaatgaggagccttccctcgttaatattaattgatggtttggggtgctggggagcagggacgcctcttcagtagctttcttcccagggcgtggggccttcagttgtggccaaggtagcagcttaatgggcttggccagcagcaggagagaaggcgggcagagctgagggaggaccggctgccgctgtcagagcaccaagaaggaggtcagtgtgggggtgagcttctgcctacttatgcctgtggggctggggaaggaggcgggtttacctcggtgtctctatctctcagactgcctctctccccctccctctgacagtttctctctccccgccttcatgtttcttctccatcagtttctggagtgcagtggcacgatctcagctcactgcaacctccgccttctaggttcaagtgattctcctgcctcagcctcccaagtagctgggattacaggctcgtgtcaccatgcccagctaatttttgtattttttgttagagaagggattttaccatgttgaccaggctggtcttgaactcctggcctcaagcaatccgcccaccttggcctcccaaagtgctgggattacagacgtgagccactgtgcctggtcaggttttgttaattaaaaaaaattttttttaaagtagagacagaggggtggcggggggcggtcccatatgttccccaggctggtcttgaactgctggcctcaagtgatcctcctgcttcagcagcctcccagagagctgggattacagatgtgagctactgtgcctggccctttcttgttttttgtttctggcaatatttgtgtctctgtatttccccaactccacccctctccccaccccaccctctttttttttttttttttttttttgtagagatggggcggggatctcactttgttgcccagactggtctcgaactcctgggctcaagtgatcctccccgcttggcctcccaaagtgttgggattacaggcgtgaatcactatgcctgtcccctctctctttgtgtctctttcagcgtgtgtctgttcctctctgtacctgtcagacccaggagtccaggcccccagcccctcctccttcagaccctgtcagtgtaccttgtgtctgcctccctgtctcttcctctccatctttctgtctgtccctgtaacccatatgtggctcctccatcatccaccgagggaccctgagctcccctccgctcacgccccctaagccctcaggatgcgcctcctcccctcccggacaaggtagactcagcctgcttgcccagggaggctgaccctggagggatggctctgtacctctcctgtgctgggagccatctggtgaccatgatgccctgccctggcccacgccactcagagtctggatggagcagtatttcccccaaaggactctggagccattggaggaaatgggagaaacaggtacggagatgccagagcctcagcagtgctggtcccagcagaccttccaccctcgttgagggtgtctgctgccctcccagagccttgtcacctccacgccactcagatgtccctcaagccttttggccttcttccctccaagtggacccacaaatattgtccaagccacccacgtacacggctaccaaaagtgggttacaaaacaggctttctggctgggcgtggtggctcatgcctgtaatcccagcactttgggaggccgaggcaggcagatcacctgaggtcaggagttcgagaccagccaggccaatgtagtgaaactccgtctctactaaaatacaaaaattagccggacatagttgcgggcacctgtaatcccagctactcagaaggctgaggcaggagaaccgcttgaatctgggaggcggaggttgcagtgagccgagattgtgccactgcactccagcctgggcaacagggcaagactgcatctcaaaaaaccccccaaaacagggccgggcatggtggctcatgcccgtaatcccagcactttgggaggctgaggtgggcagaacacttgaggccaggagttcaagaccagcctggccaacatggtgaaacaccatctctattaaaaatacaaaaattaggctggacgcggtagtttactacgcctgtaatcccagcactttgggaggccgagacgggcgggtcaggagttccagaccagcctggccaacatggtgaaaccccatctctactaaaaaatacaaaaaaattagctgggtgtggtggcacgcacctgtaatcccagctactcaggaggctgaggtaggagaatcgcttgaacccgagaggtggaggtttcagtgagccaagactgcaccactgcactccagcctcggcaagagagcaaaactccatctcaaaaaaaaaaaaaaaaaggccgggcacggtggctcaagcctgtaatcccagcagcactttgggaggccaaagcaggcagatcacgaggtcaggagatcaagaccatcctggctaacacggtgaaaccccatctctactacaaaaaatacaaaaaattagccaggcatggtggcggccacctgtagtcccagctactcgggaggctgaggcaggagaatgacgtggacccaggaggcgaagcttgcagtgagccgccactgcactccagcctggttgacagagcaagactctgtctcaaaaaaaaaaaaaaaaaaaaaaattagctgggcatggtggtacacacctgtaatcccagctactcaggagggtgaggcaggagaatcgcttgaacctgggaggcggaggttgcagtgagccaagatcacgccactgcactccagcctgggtgagagagtgagactccatctcaaaaaaaaaaaaaaaaaagttttcttcgtgtaggattgccaagcccaccccagccccacgggagtcatatgggagtgcttccagcctgccgggattaggagccacagcacctggggtccaatcccagctctgccacctacacctgtgtgtctttgggcacatcacttaacttctctgtgcttcagtttcctcatctctgcaatgcggatgatgatagggcgtacctcggagggttgctgtgggaagcgaatgagttcgtacgtgggatgagttcagagaagtgcctgacacagagtcgctgctcactgcacgaggcattgaccatgccttggcgttcaagagtgtctgctgccctcccagagccttgtcacctccatgccactcagatgtccctcaagccttctggcctccttccctccaagtggacccacagatattgtccaagctgcctacgtacatggctaccaaaagtgggttacaaaacgagctttctggctgggcgtggtgggtcacgcctgtaatcccagcactttgggaggccgaggtgggcggcctcggccatccacagtcaacctgtctccttggatctgggctgctgtttctttcacttgtttgttggtttattttttgggacagtctcgcctcgtcacccaggctggagtgcagtggcgtgatcttggctcactacaacctccgcctcccaggttcaagtgattctcctgcctcagcctcccgagtagctagaattacaggcatgtgccaccacggctggctaatttttgtatttttagtagagacagggtttcaccatattggtcaggctggtcttgaaagcctcacttcaggtgatccacccgccttggcctccaaaagtgctgggattacagacaggagccaccgcgccatgtcttactgtttctttttttgtattgttttgttttgtttctgagacagggtctgactctgttgcccaggctggagtgcagtggcacaatcttggctcactgcagccttgacctcccgggctcaagcaatcctcctgcctcagcttcctgagtagctgggaccacaggcttgtgccaccatacccagcaaatttttagactttttggtggaatggagtctcactttgttgccagggctggtcttgaatccctgagctcaagcaaacttcccatgtcagcttcccaaagtgctaggattataggcctgacccactgcacctggccagatgtacaactttcaaaccactgaagtagcttaaaatgaaaggaaaagaaaatgtaatctatttggcaatggtcgaaaagcaaaggaaaatgcagcgaatcatagaaaataaaagcaaaaagcatcacacaatgacctaaataaaaccaagcatatcagttataacaacattatgcaaatgtgtgaaacgtacttgggaacatcaacaaacaaaattcaactgtttagctttcaaaacactttccaaagataacaccaccaagttttaaaataaaaggattagaaatagctatcagtcaaaagcagatacacaaaaatcagggcaaatctgatattagagaaaaccggatttaaagcagatagcattactttggacaaaaggagttattttctattgataaagtgtatgatccagaatgaaaagtgattggatgggtgcagtggctcatgcctgcaatcccagcactttggaaggctgaggcaggtggatcacttgaggtcggcagtttgagaccagcctggccgacatggtgaaaccccgtctctattaaaaatacaaaaattagctgggcatagtggtgcatgcctgtaatctcagctactcgggaggctaaggctcaagaatcacttgaacccaggaggtggaggttgcagtgagcccagattgtgccagtgcactccagcctgggtgacaggacaagactctgtctaaaaaaaaaaaaaaaaaggctgggagcgatggctcacgcctgtaatctcagcagtttgggaggcccaggcagacggattactcaaggtcaggagttcaaaactagcctggccaacatggtgaaacctggctccactaaaaatacaaaaagccaggtgtggtgtgtgcctgtaatcccagctactcacgaggctgaggcaggagaatcacttgaacctgggaggcagaggttgcagtgagacactgcactccagcctgggtgacagtgtgagactccatctcaaaaaaaaaaaaaagtgatcatttattacactattagaaacaaaaggaaaaatacacagaaacacagtagtggtcatgggtaatttgaaaccaccattattcttcaaatatcaagtcttttaaaatgtgatattttgaataatagaatacagtgaatttaatatatatgcacactcattacatctatatacactcatgattttcaagcatatatcaaacatttgcaaagactcaatttaaaaaataaaaggccgagcacggtggctcacgtctgtaatcccagcactttgggaagccgaagcgggcagatcacctgaggtcaggagttcgagaccagcctggctaacatggtgaaaccccgtttctactaaaaatacaaaaattagccgggcatggtggcaggcacctgtagtcccagctacttgggaggctgatacaggagaatcacttgaacttaggaggcagaggttgcagtgagccgagatcgcaccactacactccagcctgggcaacagaacaagactctgtctcaaaaataaaaaggctgggtgaggtggctcacgcctgtaatcccagcactttggcaggctgaggtgggcggatcacaaggtcaggagatccagacaatcctggctaacacagtgaaaccccatctctactaaaaatacaaaaattagctgggcatggtggcgtgtgcctgtagtcccagctgctggggagactgaggcaggagaatggtgtgaacccaggaggcggagcttgcagtgagccaagattgcgccactgcactccagactgggcaacagagcgagactccatctcaaaaaaaagaaaaaagaaaagcgcctctgagaccagctgaataacatcaagcaaacaaacatatgtataataggactctggggaaaggagaggaaggagaaaaatttttgaagcattaatggctggaaacttttcaaacttggtgtaaacgttaatttacacaaactccaagaagtataaatacaaagagagccatatctagattcatcgtagtaaatgtcaggcctttgagcttaagctaagctatcattatcttttgtgacttgcacatacacatctagatggccggttcctgccttaactgatgacattccaccacaaaagaagaacccctcaaccccttctccttcaccgttagtggcaagtcccgcttttctgggggaggggcaagtaccccaaccccttctctccgtgtctctaccccttctctgcttttctgagtggcaagaacccctcaaccccttctccttcacccttagtagcaagtcccgcttttctggaggagggacaggaaccccgacctcttatctctgcaccccgatcccttatttccatgcccagacctcttatctctgtgccccatcccttatttctgcaccccaacctcttatctctgtgccccaaccccttctctgcttttctggagggcaagaacccccccaccccttctccatgtctctactctcttttctctgggcttgcctccttcactatgggcaagcttccaccttccattcctccttctcccttagcctgtgttcttaagatcttaaaacctcttcaactctcacctgatgtaaaatctaagcatctaattttcttctgaaacgccgcttgacccccatacaaacttgacagtagttccaaatagccagaaaacagcactttcaatttttccatcctacaagatctaaataattcttatcataaaataggcaaatggtgtgaggtgcctgacatccaggcattcttttacacatcaggctctccctagcctctgttcccaatgcaactcgtcccaaatcttccttctttccctcccacctgtcccctcagtcccaaccccaagtgtcactgagtctttctaatcttccttttctacagacctatctgacctctcccctccttgctaggctgagctaggtcccaattcttcctcagcctccgctcctccaccctataatccttttatcgcctcccctcctcacacccggtcccccttacagtttcgttccgtgactagcccttccccacctgcccagcaatttactcttaaaaaggtggctggagctaaaggcatagtcaaggttaatgctccttttcctttatcccaaatcagatagtgtttaggctctttttcatcaaatataaaaatccagcccagttcatggctcgttcggcagcaaccctgagacactttacagccctagaccctaaaatgtcaaaaggccgtcttattctcaatatacattttattacccaatctgctcccgacattaaataaaactccaaaaattaaattccggccctcaaaccccacaacaggacttaattaacctcgccttcaaggtgtacaataatagaggcagccaagtagcaacatatttctgagttgcaattccttgcctccactgtgagacaaacctcagccacatctccagcacaaaagaacctccaaacgcctaaaccgcagtggccaggcgttcctccagaaccgcctcccccaggagcttgctacaagtgccagaaatctggccaccaggccaaggaatgcccgcagcccaggattcctcctaagccgtgtcccatctgtgcaggaccccactggaaatcggactgtccaactcacctggcagccactcccagagcccctggaactctggcccaaggctctctgactgactccttcccagatcttctcggcttagcagctgaagactgatgctgcccgattgcctcggaagccccgtagaccatcacggacaccaagctttaagtaactctcacagtggaaggtaagtccgtccccttcttaatcaatacggaggctacccactccacattaccttcttttcaaaggcctgtttcccttgcctccataactgtagtgggtattgacagccaggcttctaaacctcttaaaactccccaactctggtgccaacttagacaatattcttttatgcactccttttagttatctccacctgcccagttccctaattaggccgagacacttcaaattatctgcttccctgactattcctggattacagctgcatctcattgccgcccttcttcccaatccaaagcctcctttgcatcctcctcttgtatccccccaccttaacccaaaggtataagatacctctactccctccttggcgaccaatcatgcaccccttaccatctcattaaaatctaatcacccttaccccgctcaatgccaatatcccatcccacagcatgctttgaaaggattaaagcctgttatcactcgcctgttacagcatggccttttaaagcctataaactctccttacaattcccccattttacctgtcctaaaaccagacaagacttacaggttaattcaggatctgcgccttatcaaccaaattgttttgcctatccaccctgtggtgccaaacccatatactctcctatcctcagtacctccctccacaatccattattctgttctggacctcaaacatgctttctttcctattcctttgcacctgtcatcccagcctctctttgctttcacttggactgaccctgacaccaatcaggctcagcaaattacctgggctgtactgcctcaaggcttcacagacagaccccattacttcagtcaagcccaaatttcatcctcatctgttacctatcttggcataattctcataaaaacacacgtgctctccctgctgcttgtgtccgattaatctcccaaacctcgatcccttacaaaacaacaactcctttccttcctaggcatggttagttcggtcagaattattacacaagagccaggcccgcaccctgtagcctttctgcccaaacaacttgaccttactgttttagcctagccctcatgtctccgtgcagcgcgtgccgctgctttaacacttttagaggccctcaaaatcacaaactatgctcaactcactctctacagctctcataatttccaaaatctattttcttcctcacacctgacgcatatactttctgctccctggctccttcagctgtactcactctttgttaagtcccacaatgaccattgttcctggcccggacttcaatccggcctcccacattattccagataccacacctgacccccatgacggcatctctctgatccacctgacattcatcccatttccccacatttccttcttccctgttcctcaccctgatcacgcttgatttattgatggcagttccaccaggcctaatcgccacacaccagcaaaggcaggctatgctatagtacaagccactagcctgcctcttagaacctctcacttcctttccattgtggaaatctatcttcaaagaaataaattctcagtgttccatctgctattctactactcctcatggattattcaagccccctcccttccctacacatcaactcgaggatttgcccccacccaggactggcaaattagctttactcaacatgccccgagtaagataactaaaacacctcttagtctaggtagacactttcactggataagtagagtcctttcctacagggtctgagaaggccaccacagtcatttcttcccttctgtcagacataattcttcagtttagccttatcattcccttctgtcagacgtaattcctcaatttagccttcccacctctatacagtctgataacagaccagcctttatttgtcaaatcagccaagcattttttcaggctcttagtattcagtgacagactaaaacacacctcaccaacctcagccaccaacttaaaaaggactggacaatatttttaccactttcgcttctcagaattcaggcctgtcctcagaatgctacaagatacagcccatttaagttcctgtatagacactcctttttattaggccccagtctcattccagacaccagaccaacttagactgtgcccccaaataacttgtcatccctactatcttctgtctagtcatactcctattcaccgttctcaactactcatgcatgccctgctcttgtttacactgccagtttacacagtttctccaagccatcacagctgatatctcctcgtgctatccccaaactgccactcttaactcttgaagtaaataaataatctttgctggcaaggctatgctgaacctccttaggcactctctaattagatgtcctaggtcctcccaattcttagtcctttaatacctgtttttctccttctcttattccgtttagtttttcaattcatacaaaaccgtatccaggccatcaccaatcattctacacgacaaatgtttcttctaacaaccccacaatatcaccctttaccacaaaatcttccttcagcttaatctctcccactctaagttcccacgccgcccctaataccgctggaagcagccctaagaaacatcacccattatctctccataccacccccaaaaattttcactgtcccaacactttactactatttcattttatttttcttaatataagaagacaggaatgtcaggcctctgagcccaagctaagccatcatatcccctgtgacctgcacgtacacatctagatggccggttcctgccttaactgatgacattccaccacaaaagaagtgaaaatggcctgttcttgccttaactgatgacattgtcttgtcaaattccttctcctggctcatcctggttcaaaagctcccctactgagcatcttgtgacccccactctgccctccagagaacccccctttgactataattttcctttatctacccaaatcctataaaaacagccccgcccttatctcccttcgctgactcttttcagactcagcccgcctgcacccaggtgaaataaacagttttattgcttacacaaagcctgtttggtggtctcttcacacggacgcgagtgaaagtaaaactgctgaaaacaattcaaaaagggcatttttttttttttttgaggcagagtctcactctgtcgcccaggctggagtgcagtggcacaatctcggctcactataagctccatctcccgggttcacaccattctcctgcctcagcctcccgagtagctgggactacaggcacccaccaccacgcctggctaattttctgtatttttagtagagacggggtttcaccgtgttagccaggatgttctcgatctcctgacctcgtgatccaccctccttggcctcccaaagtgctgggattacaggcgtgagccaccgtgccaggaaaatggaaaattttaaaggagcaagtgaaaaacagctcattatgtacaggggaacaatagaattaatggctagattctcctaggaacaatggaggccagaaggcagatgaatgatttattcaaaacactgaaagaaaaataaaactgtcaactgataattctatattcaacaaaactatacttcaaaacaaaaggcaaaagaaaatcattcccagataaacaaaaagagaattcctgactagcatatacctaaacgcagggaatactcaaggaaacccctcacactgaaaatgacagtagacagaaactcaaatccacaggaagaaatgaagagccccagaaatgtatttttcttttcttcttttaatttattttaaaacataaggtcaggctgggcacggtggcccacgcctataatcccagcactttgggaggccgaggcaggcagatcatgaggtcaagagatcgagaccatcctggctaatgtggtgaaaccccgtctctactaaaaatacaaaaaaaattagccgggtgtggtggcgggtgcctgtagtcccagctactcggaaggctgaggcaggagaatggcgtgaacctgggaggcggagcttgcagtgagctgagattgcaccactgcactccaggctgggcgacagagcaagactccatctcaaaaaaaaaaaaaaaaaaagaaaaaaaccatataaggccgggtatggtggctcaaacctgtaatcccagcactttgaggccaaggtgggtggattgcttgagctcaggaattcaagaccagcctgggcaacatggtgaaaccccatctctacccaaaatacaaaaattagccaggcatggtggtgcaaacctatagtccagtcccagctgttcaggaggctgaggtgggtgtattgctggagcctgggaggtcggagctgcagtgagctgtgattgtgccactgcactctggcctgtgtgacagagcaagactctgtctcaaaataaatagacagacaaataaataaaattgtaaaaaatatatatatataaaattgtttaaagtaaaggttatgccaggcacagtggctcatgcctgtaatcccagcactttgggaggccaaggacagtggatcatccgaggtcaggagttaaagaccagcctggccaacatggcaagaccctgtctctactaaaaatataaaaattagctgggaatggtggcaggcacctgtaatcccagccactcgggagactgaggcaggataatcgcttgaacctgggaggcagaggttgcggtgagccaagatcatgccattgcactccagcctgggctacaagagcgaaactccatctaaataaataaataaataaataaataaataaataaaggaaaggttataaggccgggcatggttgcttacgcctgtaatcccagcactttgggaggccgaggcggtggatcatgtgaggtcaggaatatgagaccagcatggtcaacatggtgaaaccctgtctctacaaaaatacaaacttaaccaggcatgatggtggctgcctgtagtccgaggtactcaggaggctgaggcaggagaatggcttgaacccaggtggtggaggttgcagtgagccaagatcacgccattgcactccagcctgggcgacagagcaagactccatctcaaataaataaaaataaataaataaaatacaaaaaattagctgggtgtgatggtgcacgcgtttagtcccagctactcaggaggctgagacagcagaatggcttgaacctgaaaggtggaggttgcagtgagctgagatcatgccattgcgctccagagcgagactctgtctcaaaaacaacaacaacaaaaaaacgcgaggcacagtggctcacgcctgtaatcccagcaccttgggaggctgaggtgggggggatcacctgaggtcagttcaagaccagcctggccaacatggaaaccccatctctactaaaaatacaaaaattagccgggcatggtggcgggtgcctgtaatcccagctacttgggaggctgaggcaggagaatcactttaacccaggaagcagaggttgcagtgagccaagatcgcgccactgcactccagcctgggtggcagactgagactccatctcaaaaaaaaaaaaaaaaaaaaacccagttatatagcactgtatttttttagagacatgatcttgctctgtcactcaggttggagtgcagtggcatgatcataacccattgtaacctcagactcccagtctcaagcaatccccctgcctcatcctccctagtagctgggaccacaggtatacaccaccacacctggataatttttgatttttttttttttttgtagagacagggtctcactatgttgcccaggctggtctcaaactcctggcctctagcaatcatcccacctcggcctcccaaaatgctgggattccaggcgtgagccaccacacctggcctgtatccctgactaggtgacatacacagtcgggtgctgcatcaccacgtttcagtcagtgatggactgcacatgcgacaatgtcccataaaattacaacgaagccggactcctatcacctagtgatgctgcagccatcacaatgctgtagcacaattactttatttttttaaatttagggtagcctaagagtacagtgcttataaagtctacaggagtgtacagtgctgtcctagccttcacattcactcaccactcactcactcacacctggagcaacttccggtcctgcaagctccattcctggtaagtgtcccatacaggcgtaccatttgtcatcttttatttatttttctgagatggagtctcactctctcacccaggctggagtgcagtggcatgatctccgctcactgcaacctccatctcccaggttcaagtgatcctcctgcctcaacctcccaaatagctgggattacaggcgtgcaccaccacacctggctaacttctttgtattttttttttttttcagccagagtctctatctgttgtccaggttggagtgcagtggcatgatcttggctcactgcaacccccgcctcccgggttcaagcgattctcctgcctcagcctcccaagcagctgggattacaggcacgtgccaccatgcctggctaatttttgtgtttttagtagagatggggtttcaccatgctggtcctgctggtctcaaactcctgacctcgtgatccgcccacctcagctcccaaagtgctgggattacatgcgtgagccaccgtgcctggcctaaacttctttgtatttttagcagagacgaggtttcaccatgttggccaggctggtttcgaactcctgacctcaagtgatctgcccacctcagcttcccaaagtgctaggattacaggcatgaactactgctcctggcccattttccatcttttataccatagttttactgtaccttttttatgttcagatatgtttatatacacaaatacttaccattgtgttacaattgcccactgtgttcagtacagttaaatgctgtgcatgcttgtagcctatgagctgtaggttactttatatagcctaggtgtggggtaggctgtaccatctacgtttgcataagtcactctatgatgttcacaccctgacgaaattgcctaaccatgcatttcttagaacttaagaccgtatagatgaccatatagaaaaccagagactgggccaggtgtggtggctcacacctgtaatcccagcactttgggaggccgaggtgggtggatcacctgaggtctggagttggagaccagcctggccaacatggtgaaaccctgtctctattaaaaatgcaaaaaattagccgggactggtggtgggcacctataatcccagatactcaggaggctgaggcaggagaatcacttgaatccaagaggcaaagatcgcaccattgcactccagcgcctggaccacaagagtgaaactccgtctcaaaaaaaaaaaaaaaaaggaaccgggaaggtcatgaaaggagcgtgctcatgcacaaatgcctgataggaacgattgcggaagactctccaaaaaccacaacctcgcacaaagtccactgcaacgttacacagaaagtacttttgtccagtaactgcctgtccaaccttggactgatgccacccttgtttcaagtctcgtagccaaggataattgattcaaaacactttatgtaatcctcctcattttgcctttgaaaacttccccttggctgggcatggtggctcacacctgtaatccaagcactttgggaggctgacccaggcagacccctagagtccaggagtttgagatcggcctgggcaatatggtgaaactctgtctctagaaaagatacaaaaattagctgggcatggtggtgtgcgactgtattcccagctactcaggaggctgaggtgggaggatggcttgaggacgggaagcgggggttgcagtgagccgagattgcaccactgttctccaacctgggcaacagatcgagatcttgtctcaaaataataataataataattattattgttattattatttaaaaatttaaaacttcgccttgcctcaatctcctctttttttttttttttttaagataaggagaggccagctatgcagtggctcacacctgtaatcccaatactttgggaggccaagacgggcagatcacaagatcaggagtttgagaccagcctggccaatatggtgaatccccaactctactaaaaatacaaattagctgggtgtggtggcaggcacctgtagtcccagctactcgggaggctgaggcaggagaatcacttgaaccaggttgcagtgagctgagatcacaccactgcacaccagcctgggcaatagagagagactccatctaaaaaaaaaaacacacacaaaaaaagagagagacataggattgggccgggcacagtggctcacgcctgtaatcctagcatgttaggaggcttaggcaggtggaccacctgaggtctggagtttcagaccagcccagttaacatggcaaaaccccatctctactgaaaatacaaaaattagccaggtgtggtggcacctgcctttagtcccaactacttggaggctgaggcaggagaatcacttgaacccaggaggcagaggttgcagtgagctgattgcatcagtgcactccagcctggatgagagagactccatctcaaaaaaaaaagaagaagaagaaagaaagaaagaaggaaggaagggagggagggagggagggagggagggagggtgggagggaaagaaattattatgtgagataagacaggtggatctcgtgagcccaggagtttgaggccatcctgggcaacataatgagacccccatctctattagaaaataataatagtaaaaataaaaaataatttaaaaagtattacttctaactataatggaactaagctaaaagccaacaataaaatgaaatttagaaaatctctaaatataagaaaactaaacaacatacttgtagatgacctatgtgtcaaagaaggaatctggctaggtgtggtggctcatgcctataatcccagccaagggaggccaaggccagtggatcaccttagatcaggagttcgagaccagcctggccaacacggtgaaaccgtgtctctactaaaaaatacaaacattagctgggcgtggtggctcatgcctgtagtcccagctacttgataggctgaggcaggaggattgcttgaacctgggaggtggaggttgtggtgagctgagatcacgccactgtactccagcctgggtgacagagtgagactccatctaaaaaaaaaaaaaaaaaaaatcaaaaatgaatttagaaaataccttgagctgaataaaaacaaaaacacaggaaataaaaatgtacaggatgctggcaatgtagtaattagcgggaaacttatagcttaaaaaacatattagtgttgagtcagcctggtgaaaattttaaaaaccccaacacattagaatggaaagaaggcctaaaatcaataatttaggcttccacctccaaagctagaaaaagaagagtaaatcaaactcaaagaaaatagtaagaaggaagtaataaagatctaaatggacagcaatgaaacagaaatataaaaacaatagagaaaaagcaatgaaactgaaattggctcattgaaaacatcaacaaaaccggtattgaaaagattaacaggccaggtgtggtggctcacacctgtaatcccagcagtttgagaggccaaggtgggtagatcacttgaggtcaggcgttcgagaccagcccggtcgacatggagaaaccctgtctctactaacaatacaaaaattaactgggcatggtggcacacacctgtaatcccagctggaggctgagacaggagaatcacttgaacccaagaggccgaggttgcagtgagtcgagatcatgccactgtactccagcctgggtgacagagtgagactcttgtctcaaaaaaagaaaagatcagcaaaactgggccgggtgcagtggttcccacctgtaatcccagcactttggaaggccgaggcaggtggatcacctgagatcaagaattcaagaccagcctggccaacatggtgaaaccccgtccctactaaaaatacaaaaattggtggggcatggtggtgggcacctgtaatcccagctactcaggaggctgaggcaggagaatcgcttgaatccggaggtggaggttgatgtgagccgagatcacaccactgcactccagcctttggcgacagagtgaaactctgtctcaaaaacaaacaaacaaacaaacaaactagtatactggttttcaatgaaatcagttagctcattaaaaagttcaacaaaagagtaagaaaaataaaaaagacagaagccctcaattaccaaaagcaagaatgaaggagggaaaaacactaacatggtacacaaattttaaaaaatcacaggggaatattatgaacagatttaggtcaactaattaggcaatttaaatgaaatgaacaaatccctagagagacacaaattaccaaaactgactcaagaacaaaatagaaacacagatacaatttttgtacaagtatccattgaaatgtattgaaaaatgaaaatgacatagaataaacaaaacaattttgagaaaggagaacaaagttgcaaggcatataatgtgactttaagactcactattcactttgggaggtcaaggtgggtggatggcttgagcccaggaattccagaccagcctgggcaacatggcgagaccatgtctctccaaaaaatacagaaattaactgggtgtggtggcatgtgcctgtagtcccagctacttaggagggtgagcccaggaggttgaaaccacagtgaactgtgatcgcaccactgcactccagcttgggaaacaaagtgagaatctgtctcaaaaaaaaaaaaaaagaagaagaagaagccaggcgcagtggctcatgcttgtaatgccagcactttgggaggccgaggtgggcagatcacctgaggtcaggagttcgagaccagcctgaccaacatggtgaaatcccatctctactaaaactacaaaaattagctgggcatggtggcaggcacctgtaatcccagcactcaggaggctgaggcaggagaattgcttgaactcaggaggcagaggttgcagtgagctgagattgtgccattgcactccagcctgggtgacagagagagactccgtcttttttaaaggaaaaaaaaaaaaaaggccaggcgcagtggctcacgtctgtaatctcagcactttgggaggccgaggcaggtggatcacaaggtcaggagttaagagaccagcctggctaacacggtgaaaccccgtctctactaaacatacaaaaaaattagccgggcgtggtggtgggtgcctgtagtcccagctactctggaggctgaggcaggagaatggcgtgaacccaggaggcggagcttgcagtgagcagagatcacgccactgcactccagcctgggcgacaaagtaagactccgtctcaaaaaaaaaaaaaaaaaaaaagagagaaagactcactataaagctacagtaatcaggaatatgctatcatgataaggatagatatataaatcaaggaatcagaagaatgattaagtccagatttaaaacaacaaaaatggtcaattaatttttaacaaaattgccaatataattcaatgaggagaaaaaacagtcacttcaacaaatggtgctgaaataactggacatctatagagtgagaaaagaaccttgacccttaactcataccacacacaaaaattaactaaaaataactaaaaattaactagaaataatatattaactaatgagacaaaaattaactaaagttaggccgagtgctgtgactcacgcctgtaatcccagcactttgggagaccaaggcgggtggatcacctgaagtcaggaattcaagaacagcctggccaacatggtgaaaccctgtctctactaaaaatacaaaaattagccgggcgtggtggcgggtgcctgtaatcccagatactcagtagactgaggcaggagaatcgcttgaacccgggaggtggagattgcagtgagccgagatcacgccattgcactccagcctggttgagaagagtgaatttccatctcaaaaaaaaaaaaaattaactaaggtttaaaaactaaacttaaatgctaaaactataaaccttctacaataaaatgtaaaaagaaatctttgtgacaaatgtttctcacgaagatttcttaagcaaagatttaagtaggtcacaaaagcacactacataacagaaaaaataactgataaaatgaacgccatcacgattagacttttgttctgaggaagacatctttaagaaaataaaaaggctcggtcaggcgtgggggctcacctctgtaatcccagcagtttgagaggccgaggcgggtggatcacctgaggtcaggagttccagaccagcctggccaacatgatgaaaccccatctctactaaaaatacaaaaattagccaggcatggtggcaggtgcctgtaatcccagctacttgggaggctgaggcaggagaatcacttgaacctgggaggagggggttgcagtgaactgagattgtgccactgcacgccagcctgagcgacagagactctgtctcaaaaaataaaataaactaaaaataaagaaaatgaaaaggctagccgggcacggtggctcacacctgtaatcccagcactttgggaggccaaggtgggtggatcacctgaggtcaggagtttgagatcagcctggccaatgtggtgacaacccgtctctactaaaaatacaaaaattggctagcgtggtggcgggcgcctgtaatcccagctactctggaggctgaggcaggagaattgcttgaacctgggaggtggaggttgcagtgagccgagatcctgccattgtactgcagcgtgggcaacaagagcaaaactccgtctcaaaaaaaaaaaaaaaaagaaaaaaagaaaagaaaatgaaaaggctaaccacagaaggagagaaaatattcatattacatatatttgacaaaggaaatatccagaaaatatgaaaagctcttgcaactcaataagaagaaaataaacaatccaattgaaaatgagcaaaagatttgaacaggcgattcacaagagaggatatcgaatggccacaggcatgtcaaataatggtcaagaacattaaaggaaaatgcaaatggaaacagcaatgaaatatcaataaacatccactagaatggataaaattaaaacaaacaaaaaaaccccaaaacctgacaataccaagtattgataaggataaagcttagctgaaatgttcatatactgaaggttgggagtatagagtggttcaatcatactgaaaaatagtttggccatttctttctttttttcctgagcagatcacaaacttgaagtgttttttgttgttgttcattttgttttttgttttgttttgttttggagacggagttttgctctgtcgcccaggctggagtgcaatggcatgatctcggttcactgcaacctccgcctcccgggttcaggcgattctcctgcctcagcctcccgaggagctgggaatacaggcacctgccaccacacctggctaatttttgtatttttagtagagacgaggtttcatcatgttagtcaggctggtctcaaactcctgacctcagattatccacctgcctcagtctcccaaagtgctgggattacaggcatgagccgccacgcccgacctgaaatttcttataaaggtaagcatattgggcagggcacaggggctcatgcctgtaaccacaccattttgggaggctgaggcaggaggattgcttgagcccaggagtttgagaccagcctggagaatacagtgagaccttgcctctaaaaaaaatttaaaaattaggctgggcgtggtggctcatgcctgtaatcccagcactttgggaggccgaagcaggtggataacctgaggtcagcaattcaagaccagcctggccaatatgatgaaaccctgcctctactaaaaatacaaacaattagtcgggcatggtggcacacgtctgtaatcccagctactcgggaagctgaggcacaagaatcgcttgaactcaggaagtggaggttgcagtgaacagagatcgcgtcattgcactccagcctgggtgacagagtggaactccatctcaaaaataaataaataaataaataaataaataaataaataaataaaatcaaataaaaattatctatgcatagtggcatacacccatagtcccagctgctctagaggctgaggcaggaggattgcttgagccaaggtggaggctgcagtgagctatggtggtgccactgcactccagcctcagtgacagagggagaccctggctcaaataataataataataaataaataaacttaaacatacacttatatgacacagcaactcaactcctgggtatttacccaaaagaaatcaaaacatcagcccacaaaaagacttttcatacaatctttattcataaacatccacactggaaacaactcacgtgtacatcaacaggtgaacagatcagcaaactcaggttcacacaatggattacaacccaaagaaatgaactgcatgaagaaaacacacgaatgaacttaaacattatgtgcgctaagcagaagtagccagacttttacaaaaagagtactatacttttctacccagatttatttatttatttatttatttagagaaggagtttcgctcttgtcccccaggctggagtgcagtgacgtgatctcgactcactgcaacctccacctcccaggttcaagcgattctcctgcctcagcctcccgagtagctgggactagaggcatgcgacaccatgcccaaataatttttctattttcagtagagacaggtttcaccatgttggccaggctggtcttgaactcctgacctcaggtgatccacccacctcagcctcccaaagtactggaattataggagagggccaccgcgcccagcctccaccaagttttagagcaggaaaaactaatttaagaagcttgagagtggatcagtggtcaccacccaggtgccaggggtgtggctgggaggggtgatggaaatctcataagtagactctaccttgatcatggtggccacacaatgggatgtgtttgtctaaattcacggaaatgtacactttttaaaattttttttatttacttatttatttttttgagatggtgtcttgctctgttgcccaggctggagtgcagtggcaccatctcgggtcgctgcaacctctgcctcccaggttcaagcgatcctcctgcctcagcccccatagtagctgggattacaggcatgcgccaccacgcccagctaatttttgtatttttagtagagatggggtttcaccatgttggccaggctggtctcgaactcctgacctcaggtgatccacctgcttcggcattccaaagtgctgggattacaggcgtgagccaccccacccagccaaaactgtacactttaaaaggaagaattttactgtgtataaatgacatctcaatgaagttgatattaaaaacaccaaggctaggtgaggtggctcacgcttctgttcctagcactttgggaggctgaggcagcaggattgcttgagtccaggagttcctactgtgtctagccactgtgccaacccttccttgagttcccaattgggaaacttcccaatgaggaatttgatgcctacagaggttgagtgaccctgtccttaaaaaaaaatttttttttttaattagccaggaacggtggtgcgtgcctgtagtcccaggtactctggaggctgagtcaggaggatcgcttgagccttggaggtcgaggcttcagtgagctgggatcatgcccctatgctccagcctgggtgagacagagcaagacgttgtctttgaaaatatataaaaagtggctgggtgcagtggctcacatctgtaatccctgcactttgggaggctgaggtgggtggatcacctgaggtcaggagttcgagaccagcctgaccaacatggtgaaaccccatttctactaaaaatacaaaaattagctgggcatggtggcacacacctgtaatcccaactactcgggaggctgagacaggagaatcgcttgaacccaggaagtggaggttgcagtgagccaagattgcgccactgcattccagcctgggcaatagagcgagactctgtctcaaaaaaaaaaaaaaaaacaaaaacggatatatatatatgtatatacatatatacacacacatatacacatatacatatacacaaacacacacacacacgcacacacacacacacacatatgtataaagtaataaatgaaagcaaacaaaatgtaatttccagaggctaagaccccaaggagaggaatcgcattcacttgggtccaccatctacttgatgtgtgatcttaaaccaattcactcaaccttcgtgggcaccaaattcctcattaggaaactatgcatagaggatctccttcagaaggttgtttcggggattgaaggaatggttagcgcagcggctacacatagtaggaactcagggaatgctgctgggactcacgttcctaagccatgaaaaccgtccagtgggtggagggtgctaccatttatgcatggaggggaagaaactacccgtgcatatgtgcagaggtccacaggggattttctgaaagatacacatgaaatgaagaccagggaaacagcagtattctcccagtaaagaggatagatgtatgtgtacatatatgtgcatatacatatatacacgtatatttataaatgacaaacacacaaaaataacagtataaatctccatttgttatatatttaaattttttgtagcgatcgggctgttgctatattatcaaggctggtctcatacacctggcctcaagcgatgctccgacatcagccttccaaagtgctgggattacaggcctgaggcatcgcgcccagctccaaatctccattctcggtgaaccatttgagaaaaaatcgcaaacatgttgcatctccaaatacctaactatgttttccacaaacagggacaggttcccacgtgcacactgtaaggcacggtgaaaatcgggacattaacacggctgaatcgctaccatctaatccgaaggcccaaccacattcaccacttgtgccaataatatgttcatttcactgtatgttttgaaatgtgtaccacatgtatatgttatctttacgaaaaaaaaaatagtatgttgaaaccactcgtcacagccaaatgaaataagagctaactcattcaagcaggagccccggaggactaaaagaatccggcctctcccaggcctcctcacctgagcagggctccctcctgactaccgcccacccactccagggcaggacgcgggaagagactgcccagcccgagggtcgcaggggcagaaaaccccaggtcctgaacgcgcctgggccccgcggcgaacctggcgtccccaccagacaccagaatcagattcaggccaggccaggaaccaccccagcttcctgcatccgccttggtccaggcagcaatgacggcggcggccgccagggggacggaagctcaagggcggggatccaggcccaagcctgggcgcgcccaccaaggcgtggatccggacgaaggttccggaacagccggtcccgagcacccacgtgcagcttccgatcacagccctggcgtggcttctctgtccccggctaaggcccgcggtcgctgcagggtgcctcgccgagggtgcgggctcggggctcacagtgctcccagcctctcccaccccaaccccgccattaaggggagccccagcgacgccctgaaccctgaaagtcacactggggccggggctgcacttggcgtccgcttcccctcccgtcacagtgaccagggctagggccgcggtcggggccgtcggggagagcggagggcgcgtgggaatggggctcgctgcgccacggaaatcccgcgccgcccttcgagtcctcccagctgctccgcagagccggggccgctgccatcgcgtctgccccgagggtgcgcaggcgggtacctgtcccgactcggggaacagcgggagcccggagacgcccgtcgggcttcccagccccacctgggacgtctctaggggcgggaggccaggagagaagagggtgggagagatgagctgcagggggatacgggacccagggacccgggatcttataacacgctttccacccgtaggattggggcccacaaatgaccagaaaggtgggactcattcgccccctttgcagatggacccatgttggcgccccttagatctgcagtgggggcaccaggacctgcggtgagcgcctctgcgccccaaacgccagcaggtccgcccgaccgcattcccagctggcttgctttgcacaaatgctgcgtcagggcacgccccacacccactccttcccagatcgcgaccctcacgccttcgcagacagaaagtgtcctaagcacaggcaggctcagagcccgcctccgcctcggattcgctgtgtggcccggagccagtatcttggcctctctgggtctcagtttgctcatctcagtgaatgggacacagacacagtcgcgctgcgggctaacgctttatttgccagccaaggccccgggcccgcctgggcttctgctcagaagatcctcacggagtccagctgcacgtccccgcccacctccaccaggcgcacgcgcgccagcggcaggcggtggcggaagtggtggtactgggcgtccccaaccacggcctgcaggggagggtcggtggtgaggattccggaggcccgtgctgggtggccctggggaaatcactcatcccctctgggcctcagtttcctcactgggaaaatggggctattgttcattctaactcttgcgtgaggatcaaacgagttgactgtgtggcacagtaaaaagaggcttttttagtgctggtaatggatattctcatttcagcgaccattacccgctattaaagcgcagaggagggaggtgaattcgcgtaagctgtgggtggtggaggatctgccgccactcccacccgccaatccttgctaggacgagttcctgggcgctgtttccaacccatccctccccatgcctcaaaccccggacctcaggaaggaatgaactgggagtagggtctgggatggcgagtctgggccacgccttcccgctaggacgcccaccccttggacacttggctggtgctcgcctcgtcctgaccctgctgtctctctgtccctcggacccaagtgggagttgtttaggcgagagagagggtcgaaggacacccttctccgccttggccacgacttccctacccccctcaccccgccccgaacctccctgccttccaccaatagcctggctttgcccaaccctctgctccagggacctaagtcttggcgtccacgcccctgtcgcagagacgcaccttgaagccgtcgtctgacgcgatgatgagcacctcgaagggctgcccgcgctggaaaggaacgcccggcccgcgctcctcgcggccccaggagccttgctccttgctgttgaagaccacctccgacgtgtccagccgggggttgaaatgcagcgcggcatcggagccctgctcctccccgcacagcaggtttacatggaacctggaagaggaggatggtggccgtcagggctcagaaaccacccagaccaagaaatgttgagggtgaggaataccgatgtctacaatttactttgaatgaataagtaaatgaaatgttggctgggtgcagtggctcaccctgtaatcccagcactctgggaggtggagaagggaggatcgcttgggcccggaagttaaagaccagcctgggcaacatagcgagaccccaccttacaaaaaaacgaaagaacaaacaaaacataaaccgcccagaccaaagtgaaggtcttatggactggcactccccattcccagagtacccccaaattaacagggacctgaagacaggcacacaccgcagaaggagaggtaggcgactaatgaccagggagcttagattcccaaggcagccaaaatatcatgaggcccttggcagaaacctacccagaccaaactcactacgcttagggcagggtgccctcatttccaaagagcctgggagctgcccaggaggtctgggtgatagccagggtgctcctgatgctcagggaaccctcagcttctacaggacaaagaataataccaggaaccccagtatttccagggtacctcagaatccagaaggcccgaagttccttagccaggaagtcaaaggatggcttggcaaggactcccagggtccagggtgtctccaggacttggagtatttccagagttccctgggactcagacatggaagtcataggactatatctaggaaccctgagattacccagggacctcaaatgcttagggaaacttagggaccccagccacaaaggcacgggggcaaatacgaatacatcagatttgaggtcagaaatggcctcggactcctagcctggtggatacaggtggcctcgggcccctacttctggactgcaaaaattgggagtcagctgatcctgagacctgtaccctttacccctagggcctggggcctcacctgctggcattgggaggaaccaagccgcgaattctcagcaccgtgccagggcggatgccctcgggcagtgaggacttgtgggggacgttctgcaagagtggggtgcaggggccactgtgagccggtgagaccgaaggagggaggcagaaggtgggtcacccctcagaggagccgaccagggctgagactggcagaaatcagtggaagaggaaagggtggcggagaggcaggaaagagaccagaaacagacagggaaacagatggggagagcaacaaagacaaacagaaagatcctcaaagagggccccagaggaagccacaaagaggtagaggggacagtcgggatgggggttacccggaggccacagcccaggccagtccgtggcacactcactgcccacttgctcctttgaaagaggagcccccagccccctccctgcttggccccgccccgggcccctggagcactcacggacatggctgggaccgggttgggcagccgtggtggtggggcctgctggggaccttaaataaaagcagggcggggctggccctgatgactcaccccaccccttcccacccaccacccacacctggcacggaccctggccctggggcaagcccggcgaagcgggagtggcacctcttcttgggggccctgatccccccatcacccagggcccgggtgcactgcccctctcctaggagctgataataagagggaatgtttaatagtaataaactcacagcagagaaggctccttgtgccactgcccctccacccctgtcttcccgctgcctggcacacggagagcctctatctcatttcatgtatttatttgttagtaatttctcttattttatacacagacatattaggtcctgggaggccaatctgggtgggaactccagacccttctctccagctgagaacctcctgcctggactgatccgtgctgaaatctaagcttctgcctctgtaatggaacagcggccacaataggagcactagtgactgacagggtggcttcatgggttcacagggggcctgcctgatcccctcagcgctgcacccctgggtcctggagtgtgcccagttcatggaagtcctcagtcaggaggggtgaaaggaggggatccactaggactatgcctgtcatttccaaggcccctcggctgcccaggagatgcaggaaatcactgattgggaccccatcattccaacagggaggagtatgggtcacccccattgtacagaggaggaggctgaagctgggatgggaagcgatttgccaaaggcaggagcgtgcaggacccgttgccctgacctctggctctcctcacctctgctcgcacctctcctgtgggttctgtctctggggctggctgtctcactctgtccgtctctgcccctaactctgtctaccacatattcctgtcccacttctctccttcaagtctctcttcttcctccttccaggactgctaccatcatgccaccaagtttgtaggtcaggatgaggtgggttttggggtggtgggtggcctagcattccatcaccacctagatcaaaagcagagcaaggcggggaccctcccgccaggcccgaaacagcccccttgggcctaagactctgcaagagaactcagggttggggaattggcttggtggaggggcgggtagggctgaaagatgcttctgaaaggcagggatggtgtgggagctgagcagaaaccactcctagcagcccagcagccctcctggaccttttccactcgccactccagctcctgccccacccagcaggctgctgagaggcctgggcagaggcaggctggcagtggaaagtttgggtggagacagcagacccagaaccatcctccaccctctgcgtcccaggcccccagcctctcgccccctccccacacactccaaggcaccaagctcagggaccagttcttgggaacatgagctcagagagggaggctagcagctgcatttcagtaggggctgcaagcacccccattctgcagaggacaaaactgaggcttagacaggggccacctctcagtcaaggaagaggccagcccctcagctccagaggggtctttgtgccaaggacatgtcatgggcacggacagagaggatagcagggtgtccggtgatcataccaccagcccagctcagttagttcccgagaatgttcccctgaatggtggactccattgttctaacattattgaccattctaaagaagacactctcgcctgggcaacacagcaagacctcatcactacaaaaaataaaaataaaataaaatagcccagtgggttggcgcacatctgcctgtaattccagctacttgggaggctgaggcaggagaattgcttgagcccaggagatcagaggctgcagggagctatgatcacaccacagctctccagcctgggcaacacagtgagacctcagtccacaaaaagaaaagacactccttacattacttgatacatcattctgtaccttgctattgtttcccaagaacatctttttatttatttctatttcttcactgtggctggatatgacttcacacccaaccaacgtgcaagtcccaacttgccttaagtgattggtcaaatggttgcagtcaatctgttaccagtctaaaaggctggctcctttcctgtaactgagatatgcatcctcgatgggctcttattcattagtgttggttatgtttctcatcagttgtgaaacaatattttcttttgttttttttttcttttgttttttttttgagacagaggctcaccctgtcacccaggctggagtgcagtggtgcgatctcggctcgctgcaacctccacctcccgggttgaagtgattctttggcctcagcctcctgagtagctgggattacaggcacccaccaacatgcctggctaatttttttgtttgtttgtttttggttttttttgagacagagtcttgctctgccgcccaggctggagtgcagtggcaccatttcggctcactgcaagctccgcctccctggttcacgccattctcctgcctcagcctcctgagtagctgggactacaggctcccgccaccacgcccagctaattttttgcatttttggtagagacggggtttcactgtattagccaggatggtctcggtctcctgacctcatgatccgcccgcctcggcctcccaaagtgctgggattacaggcataagccaccgcgcctggcctaatttttgtatttttagtagagacagggtttcgccatgttggtcaggctggtctcgaactcctgacctcgtgatctgccctcctcggcctcccaaagtgttgggattacaggtgtgagccactgcgcctggcctgaaataatattttcgtgagccttttttctttttctttctcgttttttgagacagagtctcgctctgttgcccaggcaggagtgcagtggtttgatcttggctcactgcaacctctgccttccaggttcaagtgattctcctgcctcagcctcccaagtagctgggatttcaggtgcctgccaccacgcctggctactttttgtatttttagtagagacggggtttcaccatgttggccagactggccttgaactcctgacctcaggtgatccacctgcctcagcctcccaaagtgctgtgattgcaagtgtgaaccaacgcacctggtcaccttttttcaattttaaatagttaatgtaggccgggtgtggtggtgcacacctgcattcccagctactcgagaggccgaggcaggagaattgcttgaacccaggaggcagaaattgtagtgagccaagatagctccattgcgctttagcctgggcaaaaagaacaagactctgtctcaaaaagtatatataataataataataataataataataataataaatgtatatatttctcaatagtctttctatcaaggtatccttcccataaaataaaagatgcagatattaaaggtatagttcactgattttgagaactgtggagacctatctaaccacctcctcaattaagtttcctggtgtccaggaaatagtggcctctcttctagttccaggaagccactggccagtgtcactcctgaccatttttttgttttgttttgttttgttttgtttttgagatgggggtctcactctgtcacccaggctggagtgcagtggtgcagtctccgctcactgcagcctcaatcttccaagcttaaacctcctgggctcaccacctcagcctcccgagtagctggggctacagacacacgccaccatgcctggctaattgtgtattttttgtagagagagggttttacgatgttgcctaggctggtgttgaactcctggagtcaagcgatctgcctgccttagcctcccaaagtgctgggattacaggcatgagccactgggcctggccactgctgagcattgactagccaccgaggttcttttgtctcaaaataaagaagagggagtagactgatttttcttactttatgcctcttttaggaaataatttagatgaaaagtagctaattgcacactaggtggttgtagagatttaaaattcaggctccatgaatgtcatttgttggtcacattttggttattttttatacacagtgaaggtaattctggggctgctttttgtaaatcaacattctgatgatgaaaatgacacttagaaatctcactttggctgggcacggtggctcatgcctataatcccaacactttgggaggccgaggcgggcggatcacctgaggtcaggagttcgagaccagcctggccaatagggtgaaaccccgtctctactaaaaatagaaaaaattagccgggcatggtggcaggcacctgtaatgccagctacttggggggctgaggcaggagaatcgcttgaacctgggaggcagaggttgcagtgagccaagatcacgccattgcactccagcctgggggacaagatcgagacttcctctcaaaaaaaaaaaaaaaaaggaaagaaatctcactttgttcttggccaggcgcagtggttcaccctgtaatcccagcaccttgggaggccaaggcggtggatcacctgaggtcaggaatttgagaccagcctggccaacatagtgaaaccctgcctctactaaaaataccaaaaaattatatatatctatattagctgggtgtggtggcacacacctgtgatcctagctacttgggaggctgaagcaggagaatcacctgaacccgggagacggaggttgtggtgtgtgatcgcaccactgcacttgagcctgggcgacagagcaagactccatcaaaaaaagaccaaacaaaaaaacaaaaacaaaaacaaaaaaaccccagaaactcactttgttcttaagcttttatgcccattggaaatctcacgactctatttttataaatatagtaaatattaataaaacaatccaattaccgctaagaaaaagtctattctctagtgttcagttccatttataaacttagttaattaaactctcttaaatattttaaactgaatgcataattttagaggttattcatttttcagtgtttcaattgctctataaactcatccaagtaattcttgtaagtttcctagtgattcttgtacatttcaatgcttaaacagtaaaatacatgcatagctttttcttcttccttcctttccttcctttccttcctttccttcctttgctgaacaattgggccctaaagctattatgtggggctgagcaaggtcatggtggccctgaatgggctgattggggtgggatgtccttgggagaggtgtttgggggtcagggctgagcaggatgaggagcgctcagcagaggctgcgcgtaagtgcccagtgagggccagcaggacacgtgacagggagcctgcactcccagcatgggaggaggacacctgtgtggggtgggtgcccgacgaggggcattggaaccagcctcggggggaggtgccatgtgggagtcagagatgaggactggaactgctttttttttctgggagggagttacagatatggaaagggagaggtaggcaccagccctgtggagctggactggaagtggaggcattagcgtgagctaatggtttgaggattgggttatttggtggggcaggtttggactctttttatttttatttaatttaacatatttatttatttatttagacagagtcttctctgccaccaggctggagtgcaatggtgtgatctcggctcactgcaacttccgcctcccaggttcaagcaattctcccacctcagcctcccgagtggctgggactacaggcatgtgtcactgcgcctggctactttttgtatttttagtagagacgggggtttcaccatgttggccaggctggtcttgaactcctgacctcaggtgatccacctgcctcggcctctcgaaatgctgggattacaggcgtgagccttcttataccagtttttttttgtttgtttgtttttgtttgtttgttttttagacagagtgcaatggcgtgatctcgggtcattgcaacaacctctgcctcctgggttcaagggattctcctgcctcagcctctcaagtagctgggattacagacatgcaccaccatgcccggctaattttgtatttttagtagagacaagatttctccacgttggtcaggttggtctcaaactcccgacctcaggtgatccgcccgccttggcctcccaaaatgctgggattacaggagtgagccctgcgcccggcattcttatggtagttttatacccaagcccactgaagaccgtaggagggagaggtaaagttttctttcccctgcaaaggacattcgagttgtttccactgtttggctgttatgaataatgaacgcttctacgaacattttgtttaaatatttagcacgaacatgtttttattccccttgggcatatccctaggagtagaatgcctgggtcccaagggtaacttatgtcacactttcctcccttattcagcagtcagtaaaggctggtaaatttcatctggctgtcctgtcattctctttgaatttggaacaatcatccaccctttttggtttatatgacattgactcttcaaaactcccaactatggccgggtgtggtggctcacatctgtaatcccagaactttgggaggctgaggtgggcggatcacctgaggtcaggcatttgcgaccagcctggccaacatggggaaaccctgtctccactaaaaatacaaaaaattagccgggtgtggtgacgcacgcctgtaatctcagctactctggaagctgaggcaggagaatcacttgaacgcaggagaatcgcttgaacccgggaggcggaggttgcagtgagccaagatcacgccattgcaatccagcctgggtgacagagcgagaccttgtgtcaaaaaaagacatgggaccttcattcaattaagattcatagtatgcagcaagatagaaccccctagtagggagcagtggctcacgcctgtagcactgtgagaggctgaggcaagaggatcgtttgagaccacgagttcaaggccagcctgggcaacatagcaagaccctcatctctagaagaaataaaaagctggacatgaccaggcgtggtggctcatgcctgtaatgccagcattttggaggtgaggtgggtggatcacctgaggtcagaagtttgagaacatggcaaaaccctgtctctactaaaaatagaaaaattagccaggcgtggtggtgctcgcctgtagtcccagctcctcgggagactgaggcaggagaatcacttgaacctgggaggcagaggttggttgcagtgagccgagatcctgcgctccaaccagcctgggcgtcagaaagagaccttgactaaaaaaaaaaatcccctgtttaagacagatggattaattccttctgtttctgtccataggctcttgattgcttcttaggacttctccaaaagtggaagaaacaagaaaacgttgtcattctgaaacatctttactatttttctgaggctgcagccttggccagcccgcaatctgcctttccaggcacagcaggtgacagtgtgagtggataatttgttaccatgtagcaagagacactggctttccaccctgcaatacaggagtccttcctatcagcctctcctctatctcctccagccacgccctcattttaagttctgctgcctgtatcagccacttctcccactgtcatgttggggttgctggttgctggcaacagaaccctcctccgctagtttacagagattattagcggctatgacagcttacagaatttttttttttttttgagacggagtttcgctcttgttacccaggctggagtgcaatggcacgatcttggctcactgcaacctccgcctcctgggttcaagaaattttcctgcctcagcctcccgagtacctgggattacaggcatgagccatcatacccagataattttgtatttttagtagagagggggtttcttcatgttggtcaggctggtctcgaactcccaacctcaggtgatccgcccgccttggcctcccagagtgctgggatcacagacatgagccaccatgcccggcaatagcttacagaattttcagaggactagggaataagcttccgtgctgcaaagctagagggtggatgcggagagcattccctggccagagcttcctaggctgttctagataaaaataaatacctccatcacctaactagccagaaggctcatctccctcccgtaagtgttacctcattttcaccttctaagttttgcaggtggtggagtgcagtggctgatacctgtaatcccagcactttgggaagctgaactgggaagactccttgaggccaggagtttgagaccagcctgggcagcagaggaagaccctgtctctacaaaaaaaaaaatttaaaaatgagccagttttgggccaggcatgggggctcacacctgtaatcccagcactttgggcaactgaggctggtagatcgcttgagcccaggagttcaagaccagcctgagcaacacagtgagaccctgtctctaaaaaaaaaaaaaaaaaaaaaaaaaagccgggcacagtggcacatgcctgtaatcccagctacttaggaagctgaggcaggaggattgcttgaacctgggctgttgaagctgcagtgaggcgagatcacaccactgcactccagctggggtgacagagtgagatcctgtctcaaaaaaagaaaagagtcaggcgcggtggttcacgcctgtaatcccaacactttgggaggccgaggcgggcagatcatgaggtcaggagatcgagaacatcctagctaatacggtaaaaccccgtttctactaaaaaatacaaaaaattagccgggcattgtggcgggcgcctgtagtcccagctagttgggaggctgaggcaagagaatggcatgaacccaggaggcagagcttgcagggagcccagatcacgccactgcactccagcctgggcgacagagcgagactccgtctcaaaaaaaaaaaaagaaaagaaaagaaaagaaaaaattagccaagtgtggtagcacacaaccgttgtcctacctactactccagagactgaggaaaattgcttcagcctgggagttctaggctgcagtgggctatgatggtgccactgcactccaggctgggtgacagggcaaaaccacagagcaagaccacttctttcttggctggctggctttctctttctttctttctttctttctttctttctttctttctttctttctttctttctttctttctttctttcttctttctttctttctttctttctttccttctttctttctttttctttctttctttctttctttcatctctctctctcttccctccttccctccctctctccctccctccctcccttccttccttccttctctctctctttctttttggacagtcttgctctgtcacccagcctggagtgcagtggcacaaattctgctcactgcaacctccaccttctggattcaagtgattcttgtgcctcagcctacccagtagctgggattacaggtgcgtgccaccatgccaggctaattttttgtattttagtagagacggggttttgccatgttgcccaggctggtcttgaactctggagctcaggcaaactgcccacctcagcctccaaagtgctaggattacaggtgtgagccacagtacctggccacgagggcatgtcttcaaaaaaagagttttccaggggtgcaaactcagcttggggaaacccagtcctatgtgaatctagctacaaataactctgggaaatgtagtttttaactgcctaatgcaagaaagcaggccaggctgggtgcggaggttcacgcctgtaatcccagcactttgggaggccaaggcaggaggatacttgagttccagagtttgagaccagcctgggccacatagtgaggcatcagctctactaaaataaaataaaaaaaaaattaactgggggtggtgtcacatgcctgtagtcccagccactttggcggctgaggcaggaggattgcttcagcccaggaggttgaggctgcagtgcatgatgatcttgcctgggcaatagattaaggccctgtctcaaaaaaaaaaaaaaaaaaaaaaaaaaaaaggtgggcccgctggggagtgagttagaagctgagtaagccaatcttcagtggtggttaccaaattacttggaaagatataattagttacatagtgggtaaatgtctttaactgtgggaacagttagaattcactaaaaagatttttacctgtatcattttcatcactggaatgttaatatataaaaccaaaggagtccctgaagtatcttcactgtgtttaaaaaataaccaaaaccacagggcatggtggctcacacctgtaatcccagtactttgggaggccagaagttggaggatcacttaagcccaggttccagactagcctgggcaacatagccagacccttggctaggcacagtagttcacatctgtaatcccagcacttttgaaagctgaggtgggtggatcacttgaggtcaggagttcgagaccagcctggccaacatggtgaaaccccatctctactaaaaatacaaaaatcagccaagagtggtggtgcatgcttgtaatcccagctactaagtaggccaaggcaagagaatcgcttgaacccaggaggcagagctgagattgagccactgcactccagcctgggcaacagagtgagactccatctcaaaagaaaaaaaaaaaagaacccatcaaggacgtagatctgttatcagaaatgagtcaggacttcgggctgataacagagttaatgtgcaaacccttggccaatcagcaaaggcacattgggacttgcagtatgttggctacatgtgaagttacatccagccacagtgaagcaatcactaaaaaaaaatcaaaaataaaacaaaaaacaataactcaaaatatcactaacaaaatggcactgacagaacctggggttttaaatccctacaaacacttagtgtgcgattagttacttttcaactaagttatatcctgaaagaggcctaaaatcagaaaaatcagtctgtcccaacccactttctcattttcacggcaaatgaacttatttttcttttcttttcttttctttttttgagacggaatcttggagtcttgctctgttgcccaggctggagtgcagtggcgcgatcttggctcactgcaagctccacctcccaggttcatgccattctcctgcctcagcctcctgagtagctgggactacaggtgcccgccaccacgcctggctaattttttgtatttttagtagagacggggtttcaccgtattagccaggatggtctcgatctcctgacctcgtgatccgcccgcctcggcctcccaaagtgctgggattacaggtgtaagccaccgcgcctggccttttttttcttttttgagaccgagtctcgctctgtcacccagtcttgagtgcagaggtgcgatcttaactcactgcagcctccgcctcccaggttcaagtgattctcttgcctcatcctccccagtagctgggactacaggcaggcgccacgctgtcgcattggccaggctggtctcaaactcctgacctcaggtgatccgcccgccttgttacccaggctggagtgcagtggtgtgatcttgggtcactgtagcctccacctccagggctcaggtgatcctcctgccctagcctcccgagtagctgggactacaggcacatgccaccacaatggatcaaaggaaactttgtggctactaactgctcaggagtgacagtggcttcatgtggcagaaggagcagtgactgtttctaggggcaccaggaaacttgattggggaggtggttacacaggtgactatatgtgtcaaaactcattgaactattccattaaaatctgaaccctgagcaggggctcacacctataatcccagcactttgggaggccaaagcaggtggatcacttgagtccaggagtttgagaacagcctggacaacatggcgaaaccccatcagtacaaaataatacaaaaattaggcaggtgtggtggcacactcctgtagtcccagccactcaggaggatgaggtgggaggatcacttgaatctgggaggcagaggttgcagtaagttgagatcataccactgcactccagcctgggcgacagaacaagaccctgtctcaaaacaacaacaacaacaacaaaatctgaaccttttatttaatgggaaaaatacctcaatgaaataacaattgggaaataaacacattagttatttaaaaccgaaaaaagacacacaaatattaccgtggccaggcctgtaatcacaacattttaggagaccaaggtgggaggatcgcttgagcccaggagtttgagaccagcctgggcaacatggtgagacctcctctctaggaaaaaaaaaaaaaaaaaaaaaaaagctgggcatggtggcgtgcaactgtagtccaagctactccagaggcgggaggattcccaagcccaggaggccaaggctgcagtaagccatgatcacagagagagccagaccctgtctcaaaaaaaaaaaaaaaaaaaattattgcacaactaatgagaaagataacacaattgaataagaactcatcaagggctggatgcagtggctcatgcctgtaatcccagcattttgggaggctgaggtgggtggatcacttgagggcaggagttcaagaccagcctggccaacatggtgaaaccctgtctctactaaaaatacaaaaattagccatgagtggtggcacatgcttgtaatcccagctactcaggaggctgaggcaggagaatcacttgaacctgggaagcagaggttgcagtgagtcgagatcgtgccactgcactccagcctgggtgacagagcaaaactctgtctcaaaaacaaacaaacaaacaacaacaacaacaacaaaaacccatcaaggatgcaatcaaggatgcagatctgttaccagaaaggagtcaggacttcaggctaataatagagtgaatggaaagctttggccagtcagcaaaggcacgttgggacttgcagcatgttggctgcatgtgaagttacatccagccacagtgaagcgatcactaaaaagttgagttcctgggaaacacggtacacagcatgaggcgtcagtaatgtgaggagtgtgttctttagaatggtcaataatgttagaatgatggagttcaccattcaagggaacattctcgggaactaactgagctgcgctggtggtgtgatcaccggacaccctgctgtcctctctgtccgtgcccatgacatgtccttggcacagacacccctgtggagcccagggcctggccgcttccttggctgagaagctgtccctgtctaggcctcagttttgtcttctgcagaatgggggtgcttgcagctcccactgaaatgcagctgcaagcctccctctctgagctcacgtccctaggaactggtcccccaccttggtgccttggagtgtgtggggagggggcaagaggctgggggcctgggacaaagagggtggaggatggttctgggtctggtgtctccacccaaactttccactgccagcctgcctctgcccaggcctctcagcagcctgctgggtggggcaggagtgcaggagttgggtggggagtggaaaaggtccaggagggctgctgcattgctaggagtggtttatttttatttatttatttgtttgtttgtttatttatttttgagatggagtcttgctctgttgcccaggctggagtgcagtggcgcgatctcggctcactgcaagctctgcctcccgggttcatgccattctcctgcctcagcctcccgagtagctgggactacaggtgcccgccaccatgcccggctaattttgttttgtatttttagtagagacggggtttcaccgtgttagccagtatggtctcgatctcctgacctcgtgatccacccgcgtcggcctcccaaagtgctgggattacaggctttatttttattttttgagacagagtctagctctgtcgcccaggctgcagtgcagtggtgtgatctcggctcactacaacgtccgcctccccagctcaagcaattctcctgcctcagcctcccaggtagctgggattacaggtgtccaccaccacacctggccaattttttgtattttctatagagaaggggtttcaccatgttggccaggctggtcttgaactcctgacctcaagtgatccacctaccttggcctcccaaagtgctgggattacaggcgtgagctaccatgcccagccaggagtggtttctgttcagctcccacaccatccctgcctttcagaaacagatttcagtcctgcccgcccccccccccccccccgcctcccccagtctacttccccaaccctggattctcttctagagtcttgggcccaagcgggctatattggggctggcgggagggtccccaccttgctctgcttttgatctaggtggtgatggaatgctaggccacccaccaccctaaaacccacctcatcctgacctgcaaaattggtgggaagatggtaacagtcctggaaggaggaacaagagagacttgaaggagagaagtgggacaggaatacgcggtagacagttatagacagagacaaacagagccagacagccagccccagagacagaacccacaggagaggcacgcccagaggtgaggaaaggcagaggttggggcaatgggtcctgcccggcttgtggaaaatcacttcccatcccagcctcagcctccttctctgtacaatgggggtgacccatgcttctctctgttggaatggtggggtcccaatcagtgatttcctgcatatcctgggcagcccaagggcctgggaaatgacaagcgtagtcctagtggatcccctcctttcacccctcctgactgaggacttcccatgaacccggcacactccaggacccaggggtgcagcactgagccaaccaggccgccctccgaccctgtgaagtccccctgtctggcactatcgtcgttgttgtggctgctgttccactggagacttagaagcagggatttcagcgcagacatttccagtctaggcaggaggttctcagctggagagaagggtctagagttcccgctgggcttggcttctcaggacccaacatgtctgtggataaaatgagcatgagagactctcctgtgtgccaggcagtgggaagacaggggtggaggggcggtggctcttattatcagctcctaggagaggggcagtgcacccgggctctgggtgatggggggatcagggcccccaagaagaggcgccactcccacttcgccaggcttgccccagggccagggtccgtgccaggtgtgggtggtgggtgggaaggggtggggtgagtcatcagggccagccccgccctgcttttatttaaggtccccagcaggccccaccaccacggctgcccaacccggtcccagccatgtccgtgagtgctccaggggcccggggcggggccaagcagggagggggctgggggctcctctttcaaaggagcaagtgggcagtgagtgtgccacggactggcctgggctgtggcctccgggtaacccccatcccgactgtcccctctacctctttgtggcttcctctggggccctctttgaggatctttctgtttgtctttgttgctctccccatctgtttccctgtctgtttctggtctctttcctgcctctccgccaccctttcctcttccactgatttctgccagtctcagccctggtcggctcctctgaggggtgacccaccttctgcctccctccttcggtctcaccggctcacagtggcccctgcaccccactcttgcagaacgtcccccacaagtcctcactgcccgagggcatccgccctggcacggtgctgagaattcgcggcttggttcctcccaatgccagcaggtgaggccccaggccctaggggtaaagggtacaggtctcaggatcagctgactcccaatttttgcagtccagaagtaggggcccgaggccacctgtatccaccaggctaggagtccgaggccatttctgacctcaaatctgatgtattcgtatttgcccccgtgcctttgtggctggggtccctaagtttccctaagcatttgaggtccctgggtaatctcagggttcctagatatagtcctatgacttccatgtctgagtcccagggaactctggaaatactccaagtcctggagacaccctggaccctgggagtccttgccaagccatcctttgacttcctggctaaggaacttcgggccttctggattctgaggtaccctggaaatactggggttcctggtattattctttgtcctgtagaagctgagggttccctgagcatcaggagcaccctggctatcacccagacctcctgggcagctcccaggctctttggaaatgagggcaccctgccctaagcgtagtgagtttggtctgggtaggtttctgccaagggcctcatgatattttggctgccttgggaatctaagctccctggtcattagtcgcccacctctccttctgcggtgtgtgcctgtcttcaggtccctgttaatttgggggtactctgggaatggggagtgccagcccataagaccttcactttggtctgggcggtttatgttttgtttgttctttcgtttttttgtaaggtggggtctcgctatgttgcccaggctggtctttaacttccgggcccaagcgatcctcccttctccacctcccagagtgctgggattacagggtgagccactgcacccagccaacatttcatttacttattcattcaaagtaaattgtagacatcggtattcctcaccctcaacatttcttggtctgggtggtttctgagccctgacggccaccatccccctcttccaggttccatgtaaacctgctgtgcggggaggagcagggctccgatgccgccctgcatttcaacccccggctggacacgtcggaggtggtcttcaacagcaaggagcaaggctcctggggccgcgaggagcgcgggccgggcgttcctttccagcgcgggcagcccttcgaggtgctcatcatcgcgtcagacgacggcttcaaggtgcgtctctgcgacaggggcgtggacgccaagacttaggtccctggagcagagggttgggcaaagccaggctattggtggaaggcagggaggttcggggcggggtgaggggggtagggaagtcgtggccaaggcggagaagggtgtccttcgaccctctctctcgcctaaacaactcccacttgggtccgagggacagagagacagcagggtcaggacgaggcgagcaccagccaagtgtccaaggggtgggcgtcctagcgggaaggcgtggcccagactcgccatcccagaccctactcccagttcattccttcctgaggtccggggtttgaggcatggggagggatgggttggaaacagcgcccaggaactcgtcctagcaaggattggcgggtgggagtggcggcagatcctccaccacccacagcttacgcgaattcacctccctcctctgcgctttaatagcgggtaatggtcgctgaaatgagaatatccattaccagcactaaaaaagccgctttttactgtgccacacagtcaactcgtttgatcctcacgcaagagttagaatgaacaatagccccattttcccagtgaggaaactgaggcccagaggggatgagtgatttccccagggccacccagcacgggcctccggaatcctcaccaccgaccctcccctgcaggccgtggttggggacgcccagtaccaccacttccgccaccgcctgccgctggcgcgcgtgcgcctggtggaggtgggcggggacgtgcagctggactccgtgaggatcttctgagcagaagcccaggcgggcccggggccttggctggcaaataaagcgttagcccgcagcgcgactgtgtctgtgtcccattcactgagatgagcaaactgagacccagagaggccaagatactggctccgggccacacagcgaatccgaggcggaggcgggctctgagcctgcctgtgcttaggacactttctgtctgcgaaggcgtgagggtcgcgatctgggaaggagtgggtgtggggcgtgccctgacgcagcatttgtgcaaagcaagccagctgggaatgcggtcgggcggacctgctggcgtttggggcgcagaggcgctcaccgcaggtcctggtgcccccactgcagatctaaggggcgccaacatgggtccatctgcaaagggggcgaatgagtcccacctttctggtcatttgtgggccccaatcctacgggtggaaagcgtgttataagatcccgggtccctgggtcccgtatccccctgcagctcatctctcccaccctcttctctcctggcctcccgcccctagagacgtcccaggtggggctgggaagcccgacgggcgtctccgggctcccgctgttccccgagtcgggacaggtacccgcctgcgcaccctcggggcagacgcgatggcagcggccccggctctgcggaacagctgggaggactcgaaggacggcgtgggttttccctggcgcagcgagccccattcccacgcgccctccgctctccccgacggcccggaccccggtcctagccctggtcactgtgacgggaggggaagcggacgccaagtgcagccccggccccagtgtgactttcagggttcagggcgtcgctggggcttcccttaatggcggggttggggtgggagaggctgggagcactgtgcgcctcgagcccccaccctcggcgaggcaccctgcagcggtcgcgggtctctcaaccggggaccgaggagccaggccagggctgcgatcggaagctgcacgtgggtgttcagggccggctgttccggaaccttagtgcagagccacatcttggtgggcgcgccaggccttgggtctcgatccccgcccttgagcctccgaccccctggcgtccgccttccgcattgctgcctggaccaaggcggatgcaggaagctggggtggttcctggcctggcctgaatctgattctggagtcaggtggggacgccaggttcgctgcaggtcccaggcgcattcaggacccggggttttaggcccctgcgaccttcggtctgggcggtcccttcccgtgtccggccctggagtgggtgggcggtggccaggagcgagcccagctctggtgaggaggcctgtgagaggccggtttctcccagtcctccggggctcctgcttgaatgagttcgctcttatttcatttggctgtgtcgagtgtttttaaaatatcagttttttcataaagataatatatgcatctggtatacatttcaaaacatacagtgaaatgaacacacattattggcacaagtggtgaatgtggttgggtcttcggattagacagtagcgatccagccgtgttaatgtcctgaatttcaccgttgactgacagtgtacatgtgggaacttgtccctgtttgtggaaaatagagttaggtatttggtggtgcagcatgtttgcgacttattctcaaatggttctgaggcaggaaaatagggtctggaggcagggaacataaggctgattcacacttcagctatgacaggaaacatcctctccatttacatagggcgtacagcaagtaaccaatggaaacctctagaaggtatttaaatgccaaaaaattatgtaacccagcccttgagcccctatgctccgccgcacccacactgtggggtgtatttttattttcaataaatctctgcctttgttgcttcattatttccttgctttgtgcgttttgcccaattcttcattcaagagaccaagcacctggacaccctccatcggtaacagttcatcaaaaatttttaaataaaaaattttttttgttgaggcagggtcttgctctgttgcccaggctgagtggagttgtggataagggcttactgcagcctcaacctcccaggctgaagccatcctcccacctcagccccccaagtagctgagactacaggcacgtgccatggtgccaggctaatttttttggggggggcgggtgtttgtagagccagggtcttgctatgttgcccaggctggtcttgaactcctggactcaaactcctgagctcaagcgatcctcccaccgaggcttcccagagtgctgggattacaggtgtgagccatggtgcccaacctaaatccttctttattaagtttgtcttcaaagaaatttagaatttatgattcagcttcccttctctcctccccatcctcctggatctttctgtaacagctctattgacatataactcatatgctatacaagtcacccattcaaagtatacaagtcaatgtttttcagtatattcacaaggttgtgcatccatcaacacaatctaattttagaacatttttatcatctcaaaagaccttggctcacagatgtaatcccagcactttgggagcctgaagcggaaggattgattgagcccaggagttcaagaccagcctgaggccgggcgctgtggctcacacttgtaatctcagcactttgggaggctgagatgggcggatcacttgagctcaggagctcgagactagcctggccaacatggcaaaaccacatctctactcaaaatacaaaaaattagccaggcgtggtggcacgcacctgtaatcccagctacgtgggaggctgaggcaggagaattgcttgaacccggtaggcggaggctgcagtgagcagatagcaccattgcactccagcctgggtgacagagcaaagctctgtgtcaaaaaaaaaaaaaaaaaaaaaaaaaaacaacctgggaaatatagggagacctcatctctacaaaaaataattttagctgggcatggtggtacacacctgtggtcccagttactcgggaggctgagctaggaggatggcttgagctggagaggtcgaggctgcagagagccgtgatcgctccactgcactccagcttgagcaacagagtgaaaccctgtttcagaaacaaaacaaaacaaaaaagaacaactaaaagaaaccccatacccataagcagtcactccccaacttgcccctcccccagcacctggcaatcactaacctactttccagctgtatggatttatgaatctgcttgttttccacacgtggaatcatacaatatgtggccctgtatatctggcttcttccacggagcatcatgttttcagggtttgtccatgtcatagcatgcatcagcacttcattccttttcatggctgaatgctgttccaatgtgtggatcgaatatacgcgtttacccattcatcatggtgaataatggatatctgggttgttcctacatcttggctattatgaataatgctgctatgaacctattgtgtgaacatgttttcatgtctcttgggtaagtacctaggagaatttctgggtcaggccaggtgctgtggctcatgcctgtaattccaccactttgggaggccaaggcagatggatcacctgaggtcaggagttcgagaccagcctgatcaacatggaaaagccccatctctactaaaaatacaaaattaaccgggcgtggtggtgcatgcctgtaatcccagctacttgggagactgaggcaggagaatcgcttgaacccaggaggtggaggtttcagcgagccgagatcgcaccactgcactccagtctgggcatcaagagcgaaactccgtctcaaaaaagaaaaaaaaaaaaagaattcctgggtcacatgactcttttaagttccgtttcaaagaactgccaaaccattttccaaagtaactgtaacattttacattaccatcagcaacatatgtgttcctatttctccatgttctctccaacacttgttattgtcttttttttttttttgagacagggtcttgttctgttgtgtaggctggagtgcagtggtgaaatcatggctcactgcagcctccacctcctgggctcaagcaattctcctacctcaggcctcccaattagttggaactataggtgtgcgtccccatgcttggctaatttttaaaaattttttgtagagacaggttcttgctatgttgcccaggctggtcctgaactcttagcctcaagtgatcctcccaccccggcctcccaaagtgctgggattacaggcatgagccaccacacctgacctatctgtcttttttattatagccatcctaataggttggcttcaccacttggtgaagagatatgtcatgtggttttgatttgcatttccctaatgacatgggttgccgtttatatatcttctttgcagaaatgtttatcgaaattttctgcccattttaaattggatttttaaaaggtgttatataatcttatccataaatatgtgtataattctaaatgatatttattttttaatttttatttttgagatggggtctcactatgctgcccaggctggtctcaaactcccaggttcaaacagtcttcccaccttagcctcccaagtagctaggattacaggcatctgccaccacgcctggcaggctctctttttaaacaaaacctcattaccattctaactcctaaaaaatttacagttcatatcattgtatgatacaatgtttgcaaagtttgtatgcaaaggtttcccccaacattttattatgaattttttcagacatgcagaaaagttaaaagaattattctatgaatacctcatataccctaaccagattctatataacattttactcaacttgctttatcacacatagatccatctatccacccttctatccatccatcaccatcttctttttttcttttcttcttcttctttttttttttttttttgagaggagtctcactctgttgccaggctggagtgcagtggcgcgatctcggctcactgcaacctctgcctcccaggttcaagcgattctcctgccccagcctcccgagtagctgggattacaggcacccaccactatgcccggctaattttttgtatttttggtagagacagagtttcaccacgttggccaggctagtctcaaaaattcctgaccttgtgattcgcctgcctcggcctcccaaagtgttgggattacatgcgtgagccaccacacctggccaaaaaatatggaacacttcacaaatttgcatgtcatccttgcgcaggggccatgctaatcttctctgcatcattccagattttagtatatgtgctgctgaagcgagcactatttctttattttattttaatattttgtatttttgtatttttgtattttttttttattgatcattcttgggtgtttctcgcagaggggggatttggcagggtcacaggacaatagtggagggaaggtcagcagataaacaagtgaacaaaggtctctggttttcctaggcagagtgtgtgtgtccctgggtacttgagattagggaatggtgatgactcttaacgagcatgctgccttcaagcatctgtttaacaaagcacatcttgcaccgcccttaatccatttaaccctgagtggacacagcacatgtttcagagagcacagggttgggggtaaggtcatagatcaacaggatcccaaggcagaagaatttttcttagtacagaacaaaatgaaaagtctcccatgtctacttctttctacacagacacagcaaccatccgatttctcaatcttttccccacctttcccccttttctattccgcaaaactgccattgtcatcatggcccgttctcaatgagctgttgggtacacctcccagacggggtggtggccgggcagaggggctcctcacttcccagtaggggcggccgggcagaggcgcccctcacctcccggaccgggcggctggccgggcagggggctgaccccccacctccctcccggacggggcgtctcgcctggcggggggctgacccccccacctccctcccggacggggcggctggctgggcagggggctgactcccccacctccctcccggacggggcggctggccgggcagaggggctcctcacttcccagtaggggcggccgggcagaggcgcccctcacctcccagacggggtggctggccggggcggctggccgggcggggggctgacccccccacctcccttccggacggggtggctgccgggcggagacgctcctcacttcccagacagggtggcagccgggcggaggggctcctcacttctcagatggggcggttgccaggcggagggtctcctcccttctcagacggggcggccgggcagagacgctcctcacctcccagacggggcggcggggcagaggcgctccccacatctcagacgatgggcggccgggcagagacgctcctcacttcctagatgggatggtggccgggaagaggtgctcctcacttcctaggtgagatggcggccgggcagagacgctcctcactttccagactgggcagccaggcagagggactcctcacgtcccagatgatgggcggccaggcagagacgcacctcacttcccagacggggtagcggccgggcagaggctgcactcttggcactttgggaggccaaggcaggcggctgggaggtggaggttgtagctgagatcacgccactgcactccagcctgggcaccattgagcactgagttaacgagactccgtctgcaatcccggcacctcgggaggccgaggctggcggatcactcgcggttaggagctggagaccagcccggccaacacagcgaaaccccgtctccaccaaaaaaatacgaaaaccagtcaggcgtggcggcgcgcgcctgcaatcgcaggcactcggcaggctgaggcaggagaatcaggcagggaggttgcagtgagccgagatggcagcagcacagtccagagggagaccgtggaaagaggagagggagagggggagggggagggggagggagctattttgtatttttttagaaacagagttttgctctgttgtccagactagagtgcagtggcctgattatggttcacggcagcgttgaactcctgggcacaagccaacctcctgcctcagcctccctagcagctggaactacagatgtttgctacatctggcttacttttttattttttgtagagacagggtctcgccatgttgcccaggctggtcttgaactcctgggctcaagcaatcttcccacctcgtctcccaaagtgctgggattacaggctcatgccatcgcacccagccatcattttatttacttatccattcgaagtaaattgtaaacatcagtatttgtcacccctaaacatttcagaagtacatcattagctagagtacaatatttgtttatgattctttccttgtggtaagctttgcggaaagattctttgtttatattggtgaaatgcacaaatctaaaatgtacagttggctgggcacagcgactcacgccggtaatcccgacactttgggcggctagggcaggagcattgcttgagcccagggagtcgagatcagcctgagcaacataaggagacccccgtctttataaatatatatatttttaattagctgggcatggtggtgcacacctgtggtcccagctacctgggaggctggagtgggaggatcacttgagtcccagaggttgagcctgcaatgagctgtgatcacaccactgcactccagcctgggcaatagagtgagatcctgtctcaataaaaacaaaaataaaaagaatttaataaaataaaatatacagccaatgagttctaacaaatgcacagagctgtgtgacctagggtatggaacatatccatcactccagaaagttgctttagacatgcaaacatttaaacttagtttgagtcatgctaataaccggttttacagcattttatccaattaataatatagagggtttaattcgtcacttcatggtttgtcctgaagcttgctaacccattacatcagaaagccaacccagctaatttgaaagtggatgagtcagtgactggtgaataagtaaacacgagagtgaataaagaatagatggatgaatgaaaatgtaaagaaatcagctgggggcagtggctcacgcctgtaatcccagcactttgggaggccaaggtgggtgtatcacgagtcaagagattgagaccatcctggccaacatggtgaaaccctgtttctactaaaaatacaaaaattagctgggcatggtggcgcatgcctgtagccccagctactcaggaggctgaagcaggagaatcacttgaacccatgaggcggaggttgcagtgagctgagatggcaccactgcactccagcctggcgacagagcaagactccgtctcaaaaaaagaaagaaaaaaaagaaagaaatcaatgaatgggccaggcacggtggcccacgcctgtaatcccagcactttgggaggcggaggcaggcgcaccacctgaggtcaggagttcaagaccagcctggccaacatggcaaaaccctgtctctactaaaaatacaaaaattagctgggcgtggtggtgggtgcctgtaattccagctactcaggaggctgaggcaggagaattgcttgaacgggagatggcagttgcagtgacctgagacagcaccattgcactccagcctggatgacaagagcaaaactctgtctcaaaaaaaaaataaataaaaataaaaacaagaaatcaatgaatgatgaaatcagcaaaagagtgatttgatgaaagcatggttgggtggacagatggagagaagaaaatataaatgaatggataactttccagcttgagttggaaaagggttggaaaaaaatagataatgaagagatgaatggataattggatagaaagagatggaaaagtgatgaattgctgaatggagggatgaatgggcatatggaggacaaatggatgactgtgatggaaagcagagaattacatggacaaatggagggatgaataaatgaatggatggacgaaagttagacttcgtaaggatggctgaatgaatagacagatagactggtatatggttagatgtttggatggatggagaagatgatggatgatcagatgcatgggtgatggataaaaggttgaatgaaagaatggatggataaacagctggatagagctagacagactggtgagtagatgaatagttgcatgtttggatgaatgggtgaacatatggttgactggatgtttggagagattgacgatgagatgatgagtgcagaggtaaatggatgggtagatggataaagggttggatgaaaggatggttgaacaatcagctcaatggatggattgatgaggtctagatggttggatgtttgattgatggatggttggatggacttttggttggatacatggagagattgatggatgttgggatacacgagtggagagatggatgcatggatggatggaacgacaggctgtatagtggttaagtgtgcagatccttgggagccagatcagctggatttgaatcctccttctgccatttatgcaatgtataatttgggcaatttgttttattttcctttgtttcctcatctgttacagagggatgataataattgtttctacctcttggggttgctgtgagaagtgaatgagccctaaatcagtgcttggggcataaccagatttatgatgacaggaggatggatggtcagatgactggatggatgaaggatagatgaagtgcatgactgaaccaaggaagggaagagtagccggggagcagatggagacacacactcatgagacaccctcagacattttattaggggcttagaaaggagtcctaggggataattctgttttcccatgagttatggccccaggaatagattagatctggacataggacaaggtgacatcaccctggatttccaatgtgtccaccctctggaaggccgagaggcgatgggcaaagtcaaagaggtgctggccattggcgtaaaccttgaagcgatccaagccacagcgaatggacagctgcagggagaagggtgggcatgaggccagggccaggactgaggccctggaaggaagtgggaaaagagagctcagactcacatcaaagaactgtccgggaccaaatgggttgtgggtgatcttcttctcctcggatccccacgagccattcagaaggctgttccggaccacggtaccgttgcccatgcggggattaatgtgcagagctatgtcccctgaggagcccaccttgaagttgatagcaaagctggggacagagagggatgggggagtcagatggagtccagtgggaagaggccagtgggctggacctctgaatccctaaaggaggaggggacagagggtctagattgttgggtctgagggaggagggggctgggggttcccacctagtttacgttatacctcttgcctgtgggaggcacatagcccttgatgatgatggttcttcgagctgtgagccctccttgcagcctcccgaaatatggcacaggctgtgggaagagaacggggggtcccattctctctcagcttagcagagccagatgtgggaagaaattttctttttcttttcttttctttcctgtctttttttcttataagagatggggtcttactctgtcacccaggctggagtgcagtggcatgatcaagcctcactgcagcctcaaactgctgggctcaagcaatcctcccatctcagcctcccgaagtgctgggattacaggcgtgagccaccacgcccagccttgcaggaacaaaggaacaaattttgtttttttttttaggcagagtctccctctgacgcccaggctggagtgtagtggcataatctcagctcactgcaacctctgcctcctaggttcaagcaattctgctgcctcagccttcctagtagctgggattacaggtgtgcgccaccacacctggctaacttttgtcattttagtagagacggggattcatcatgttgaccaggctgatctggaactcttgacctcaagtgatccacctgccttggcctcccaaagggctgggattataggcatgagccaccgtgtctggccaagaataaattttctttttcttttctttttctttttttttttttttttttttttttgagatggagtctcgttctgtcaccaggttggagtactgtggcacgatcccggctcactgcaacctccgactccctggttcaagcgattctcctgcctcagcttcctgagtagctgggattacaggcgcgcgccaccatgcccagctaatttttgtatttttagtagagacagagtttcactatgctggccaggatggtctcgatcgatctcctgacctcgtgatctgtccgccttggcatcccaaagtgctgggattacaggcgtgagccaccatgtccagcccaagaacaaattttctgagaggtcccactcctcctggaaaacatccccaattccttctgctccctaaacctgaccacgaactctatctacccttcccctacctcccaccccaaaaccctcagcccactccctttctggctgtctcagattccctggagatccgtgccccctccccaccatccatctctgtttccccaagccataccgggttgaaggttgggggtccttccatggtctgtgaagtgaggaagaagcgatattattctccaagagtcgacagatatctatgacacacccattagactccggcgtttctctaggtgctgggttagtacaccttgggctgcaacccctcttagctccccctaccccaattctcaccattcccactcctcacccggggccctcccagccctcccactcacgggcaggctgttcagctgttgatggcaatgtccgggaccctgaacgatggacagaaggcaggaagggtgagaggggctgagggaccccactagggaggaagaccctcacctatcagcaagtacttacagggtaaggtggcatcatcgggggtccctgtgggcacagaaagagaaagcggttatgagagggtccccagatttgcgactgaaagatgtcgagagtgcctgccctggggtggcccaccaccaccaccactatgccagagaactctggcatcaaagggtggcaccccgatcacagattcacggagaggggcaccccatgttctgggatcgctgatgcccagtgagtcaccccaaagctttaggacaatgcttggtccattttgttctctgtgcccttccccttgctgtcttcctgctgtcccggggccctcactcgctgatcttgatctcagtttctgcctctgtccctgtgtctctgcctctctctctgtcttggccacacctcagcgcaggggcttccttctgccaaacacttttatttatttatttgagatggaatttcgctcttgttgcccagggtgccgtgcagtggcacgatctctgctcacctcaacctctgcctcctgggttcaagtgattctcctgcctcagcctccggtgtagctgggattacaagcatgcgccaccacgcccagctaattttgtatttttaatagagatggggtttctccatgttggtcaggctggtctcaaactcccgacctcaggtgatccgctcgcctcaccctcccaagtctaacacctttaacttttactctctctctttctctctgttaccttctcttttctcctccttgtaattaactccattctgccttgacttctattctcagccagctattctgaaggccttttaaaagtagctttatatagccgggcgtggtggcaggtgcctgtaatcacagctacttgggaggctgaggaagaattccttaaacctgggaggcagagggtgcagtgagctgagatcatgccactgcactccaacctgggccacagagcaagactccatctaaaaaaaaaacaaaaaacaaaaaacaaacaaacaaataaacgtagctttataagccgggggctgtggctcacgcctgtaatctcaggactttgggaggctgaggtgggtggatcacctgaggtcaggagttcaagaccagcctggacaacataggaaaattcctcccctctgtctttacaaaaaatttaaaaactagctggggctggtggtgcgtgcctgtagtcccagctactcaggagactgaggtgggaggatcacttgaacccaggaagtcaagaatacagtaggctgtgattgcaccaccacactccagcctgggtgacagagccagaccctgcctcaaaaataataataataataataataataataataataataataatattgataaactcaatttaattgtatgttatttatttttaatgattgtgttaagcaacctctagggaattcattcactatcgtgtgttctttgcctttccttatcctcactttctgactcaccttacacacttcctcctactccaggaagcacttccttcctgacccatgactagtcaagcccttcctgtaggctcccaaacctcctgtatactccatatcccagcccctgcccctctgcctgtgccctccctatcacagacctgaccatttctgggctgtcactctctgatgccatgtctgtgagcccagtgaggtcagggcccagagatatctcagtcattcctgtctccagccctgggcctgacccctctgcctgcctccacccaccctcctgtcctggccctgatccctctgtctgggcccaaacccaactgcaacccttcagccagggcctccccatcccggcctttatcccttgcagtgatgggtctgtcttcccagtgggatcccttgatcatcactgggctcttggcataactcagcagagggagatgcttgggaaataaatgaatgtggaatgcgctgggcaccatggctcacacctgtaatcccagcactctgggagactgtagccagcagatcacttgaggccaggagttccagaccagcctggccaacatggtgaaaccccgtctctactaaaaatacaaaaattagccagatgtgatggtgggtgcctgtaatcccagctacttgggaggctgaggcaggagaattgcttaaaactgggaggcagaggttgcagtgagccagaatcacaccactgtactccagcctgggagacagagcaagactccatctcaaaaagaaaaaatagaccaactgcggtggctcacgcctgtaatcccagcactttgggaagtcgaggtgggtggatcatgaggtaaggagatcgagaccatcttggctaacacagtgaaaccctgtctctactaaaaatacaaaaaaattagccgggcgtggtggcaggctcctgtagtcccagctatttgggaggctgaggcaggagaatggcgtgaacctgggaggcggagcttgcagtgagccaagatcgcgccactgcactccaacctgggcgacagagtgagactccgtctcaaaaaaaaaagaaaaaaagaaaaaaagaaaaaaaatgaatgtggaactgaatttagaaagaaaggacgcaagaagggatgggacccctcacacctggggccggaggggctggcctccgatgaagttgattgattgaagttgcagatccccatccacttgcaggtgggtgaccatctgtaggggaagccggtgcccgtactcatagaagggatttccatttaccaccacctggagggcagagatgggaggtcaggagtcagcacccatgatcctgggaaggtacaaacaggaagcaagggcagggcaccctggctcacgcctctaatcccagcactttgggaggctgaggggggtggatcatttgagatcaggagtgtgagaccagtctggccaacatagtgaaaccccatctctactaaaaatacaaaaattagccaggcatggtggcgggctcctgtaatcccagatactcaggaggctgaggcaggagaatcgcctgaacccgggaggtggaggttgcagtgagtggagatcacgctgctgcactccagcttgggtgacagagcaagactctgtctcaaaaaaaaaaaaaagcaaggatcagggatctttttcattgggagtcgatagtcttggggatgagctgggacagcctcagcatcaggaaccttggagtccacagctcagaggtcaagctaaggtcaaaaatcagctcactggccgggcgcagtggctcatgcctgtaatcccagcactttaggaagccaaggtgggggatcatttgagatcaagagttcgagaccagcttgagaaacatagcaagaccccgtctttacaaaaatatacaaaaattagccgggcgtggtggtgtgcacctagagtcccagctactccggaggctaatgtgagaggatcacctgagcccggggaggttgaggctgtagtgagctgtttgcatcactgcactccagcctgggcaacagagcgagacccagtctcaagaggaaaacaaaaagtacacgttttgcaaaaaacacaaagtggtaggaggaaatacacatgaaatgtattacaagactctcagcagtagggtaatgggactaaggaaaagcgctaaaagaggatttttaaaaataggcaggaaacggccgcccttcgtctgggaggtgaggagcgcctctgcccggccgccccgtctgggaagtgaggagcgcctctgccaggccgccctgtctgggaagtgtacccaacagctccgaagagacagcgaccatcaagaatgggccatgatgacgatggcggttttgtcgaaaagaaaagggggaaatgtggggaaaagaaagagagatcagattgttactgtgtctgtgtagaaagaagtagacatagaagactccattttgttctgtactaagaaaaattcttctgccttgagttgctgttaatctgtaaccttaccctgtgttccctgagacatgtggtgtgtcaactcagggttaaatggattaagggctgtgcaggatgtgctttgttaaacagaggcttgaaggcagcatgctccttaagagtcatcaccactccctaatctcaagtacccagggacacaaacactgtggaaggccgcagggccctctgcctaggaaaaccagagacctttgttcacgtgtttatctgctgaccttctctccactattatcctatgaccctgccacatccccctctctgagaaacacccaagaatgatcaataaataaaaataaataaataaataaataataaaataaaataaaataggcaggaaagaaggaaaagaaaagaaagaagttgacataaaaagtggggatggaaaaaggaaataaatgaaggagggaaggagagagaaggaagaagagaggagggaagggggaaggaaggaggggaggaaagaggagagaacagagaaagaggaaggaaaaagaggaaaaagaaggaaggggctgggtgtggtggctcacgcctgtaattccagcactttgggaggccaaggagggcagaacacctgaggtcgggagttcgaggccagcctgggcaacatggtgaaaccccatctctactcaaaatacagaaattagctgagcgtggtggcacgcgcctataatcccagctactcgggaggctgaggcaggagaagctcttgaacccagcaggcagaggttgcagtaagctgagatcatgccactgcactccagcctgggcaacagagtgaaactccatctcaaaaaaaaaaaaaaaaaaaagaaagaaagaaagaaaaggaaggaaggcgggaaggaaggaagcagccaagatggcgccactgcactccagcttgggaaacaagagagaaagcatgcagaccttgtagtgctcagccaggactatgaagaccagctcaaaggcggcaccctttttgaagggcatgctcctcttcctctcctcgctgccccacttcccgccctgcaacgtgttgaagaccaccttgtcccagccgtcaaaccgcggattgaagtggaaggcgacgtctgagcccggatcctgcccaaccacaaagttcacgaagaacctggcgggacacaaagggctcattcccctggtgccacctcccggggcctgggggcctcctccaggaagccctctccctgccgccctgtcctcggcctccctggcccggacctcagcaccagctctgaggggcaaccttggcactgtgggccacagcgtggagaggacctgagttctgaggggggcagattcccaccaccacaccttcgctcacagcctttccttctttttttttttttttttttttttgagatggagtcttgctctgttgcccaggctggagttggagtgccgcgatctcagctcactgcaacctccgcctcctggattccagtgattctcctgcctcagcctcccaagtagctgggattacaggcgtgcaccaccacgtccggctaatttttgtatttttagtagagacagggtttcaccatgttggccaggctgatctcaaactcctgacctcaggtgatccacctgcctcggcttcccaaagtgctgggattacaggtgtgagacaccgtgcctgacattttttttcttgagacagggtcttgtgttctcaccctgtcccccaggctggagtacagtggccacgatggtggctcactgcagcctcaacctcctgggtcaactgattctcctgcctcagcctccctagtagctgggactacaggtgcatgccactatgcctggcttttttttttttttttttttttttttgtagagatggggtctcactatgttgccgaggctggtctcaaactcccgggctcaagcaatcctaccacctcggcctctcagagtgctgggattacaggtgtgagttgctgtacccagcccaccttgccttcttagaccacctcctccaccctcttcccaacttccagttatgactgttacaagtctgccacgggccaggccctgtcctatgcactttgggtctccctgctcccctcctggccctgaagatcatttccctcatgcagccagagggtccctgtgtacacccatgacgcatcatattccgcacccctgggcacaccagcatccttgaaattactccccaggacaggcctgtctcagggcctttgcactggctgttccctctgcctggaaggcccttccctcagctgtccctggggatccctctctccgttccttctgttctttgctgatatgttcccttcccaggcaggccttctctggccacctttttaatttttttgagacagtctccctttgtcacctaggctggagtgcagtgatgcgatctcagctcactgcaaactctgccttcaggattcaagtgattctcccacatcaggctctcaagtagctgggattacaggcacctgtcaccatgcctggctaattttgtattttcagcagagatgagatttcgccttttttttttttttttttttttttttgagatggagtctcgctctttcgcccaggctggagtgcagtggcgcaatcttggctcactgcaagctccgcctcctggtttcacgccattctcctgcctcagcctcccgagtagctgggactacaggcacccgccaccatgcccagctaattttttgtatttttagtagagacggggtttcactgtgttagccaggatggtctcgatctcctgacctcgtgatccgcccgtctctgcctcccaaagtgctgggattacagacgtgagccaccacgcccagccagatgcgattttgccattttggccaggctagtctcgagctcctgacctcaggtgatctgcctggcttagccacccaaagtgctgggattacaggcgtaagccaccatgcccggccaggccaccctatttaaggggacaatttaaagggaacctctgtccgcacatacactccccatctcccttccctcctcattttcttcatagcacttaatatcatctgacatcttacatatttgactttttttttttttttttttgagacagagtctcactcttgttgcccaggctgtagtgcaatggcacgatctcggctcaccgaaacctccacttcccaggttcaagtgattctcctgcctcagcctcctgagtagctgggattacaggcatgcgccaccacgccctggtaattttgtatttttagtagagacagggtttctccattttggtcaggctggtcttgaactcccgatctcaggtgatctgcctgcctaggcctcctaaagtgctgggattacaggcctgagctaccgcgcccggcctggacttattttttatgtttcccctactaggacatcagctccacgagggcaggggtctctgtcctgttcactcctccatccctagtgccaggacacagaataggcactcagtgaagaagtaaacaataaataaataaacaacaggctgggcagagtggctcataccagtgcctgatcctcccagcactttaggaggccgaggctagaggatcgcttgagcacaggagttcaagaccagcctgggcaacataacaagactttgtctctacaaaacaaataataataataaataaaaattaaaaattaaattagttgggcatggtggcacatgtctgtagtcccatctgcttggaaagatgaggtaggaggatcactttagcccaggagttggaggccgaagtgagctataatattgtgccactgcactccagcttgggcaacagagcaagaccctatctctaaggaaaaaaaaagtcctatgaggccaatcattatcaacgtgttaaggccctttttaaaaagctaagactgggccaggcgcagtggctcacgcctgtaatcccagcactttgggaggccgagatgggaggatcacttgaggtcaggagttcgagaccagcctgaccaacatggtgaaaccccatctctactaaaaatacaaaaattagccagtgtgctggcacatgcctgtaatcccagctactcaagaggctgaggcaggagaatcgcttgaacctgggagacagaggttgcagtgagccaagatcatgccattgcactccagcctgggcgacaagagcaaaactccatctcaaaacaaaaaaaaaaacaaaaaaaacaaaaacagaaaagaaaagaaaatgaagcacagagaggtatagtcactttcactctttcaccaacacagagctggggagtggcagagctgggattttaactcggggacccggctctgagcctgtgatctgaattcctgccattgcacccatcagcttcagtctaatgtccaactcagggactgcctctcacggtgagccctccctgaaccttctggcccccacgtccccactcctgatctgccccagattcatctctggctattgggtggggcagaaaaagagtcccctctccaccagggtggggtaagggcagaaagcccccaacagccaggcccagagcacccagttggaagtcccctgccagcccggcctggcttggggagggtcttaccgcttcatgtgctcgctggccactccttggatgtaaacagacattcccacgttgagcccgcccgggatgggctggtagtaaggcagcgtctggagaagaggcctggtgaggggactcacaagccatctgcctgttgcagcctttacccctcccagaaaagccccccagtcccttaagcaggagagaggaaaccatgggggaggaccaggttgaagatgacgagggccaacagttagacgtggacacagacagcctgaggtcagggtaggagtaaatcgagggtcggggtcagctttgggtaaatcagaccacagagtcagatggggccccccaggatcagagtggggaaaattggtgtgagggcttatggacggagctgcgggcggagtggggcctgagctggcatctcaccgggttgtaggtgggctggtagcccggtgcggggacataggccatcgctcgaggctgcgctagtggctggtcctgtgagaagagctgcaggagtgggagatggtggcggatggcaggcggtggtggctcttatacccagggtaagggagtggctggcaggggagggtccacagggctcctcttctgggactctcaggctgtcggcttctcctagagcgcaccctagtctcccttcccttgccagcttccctggtgaccagccaggacccaaatcacctgggtcccctcccctacgccctcctgcaaagaggaagtgctcatgaacttcggccctgccagggccttatcagagcccataaaaccctgcccagacttctgttggcagagggagggtgagaccaggcagggcagggcaggctgcaggaatgacccaggacaggtgggcagcggaggaggagaacgcggaggaactgcaaattcctgcctctcccagcaactgtgaagggacctacgttgattgcgtgcccaccacacatctttaccacgtatgttgtattgtagggagagtggtttagattactagtgtgtggagccagaggttctaggttcaaatcctgcctttgccacttctcagctgtatgatcatgggtcagtgccttaccctcaatttgcccatgtgctcatctgtaaaatggggatatagtagtatcggctgggtgcagtggctcatgcctgtaatcccagcactttgactggccgaggtggatggatcacctgagggcaggagttcgagaccagcctggcaaaatcccagtctctactaaaaatacaaaaattagccaggcatggtggtgggtgcctataatcccatctacttggaggctgaggcaggagaatcacttgaacctgagtggaggagagtgcagtgagccaaggtcacgccactgcactccagcttggatgacagatggagactctgtttcaaaaaaaaaaaaaaaaaaaaaggaattcataagagaggaaacaagtattgaatagctatcaaaatattttaaaaatgaatttgtgatccagtaatgcctgtatgttattaatctgccaaataagttctagctgtgggtccaactgccactcagaaaaataaataaataaagaaaagagtagtatcaaccttaggctgggtgtggtggcttgtgcctacaatcccagcaatttgggaagctgaagcaggaggactgcttgagcccaggagttcaagaccagcctgggcaacatagtgagacccccatctctacaaaaataaaataaaaattagctgggcatggtagcacacatctgtattcctagctactcagaggctgaggcaggaggatcgcttgaacccaggagttaaggttacagtgagctatgatcatgccactgcactccagcctgggtgacagactaagagtccgtctctaaaaatagcaacaataatagtcataataataataatcataatagtatcaacttcatagagtccttgatcattaagataataaatgctcagaacaggacatagcatatagaagtcattaacttaatgcttggtctcttgcagtcattccaaacataaatccggaagattgggatgatatatggataaaaaatcccaaagttttgtttgctcatttttgagacagagtcttgctctatcacccaggctgcagtgcagtggcaccatctcagctcactgcaacctccacctcccaggttcaagggattctcctgcctcagccttctgaatagctgggattacaggcttactccacgcctggctaatttttgtatttttagtagagaccaggttttgccatgttggccaggctggtctcaaactcctgacctcaagtgatccacctgcctcaacctcccaaagtgctggaattacaggcatgagccactgcacccggccagaaaccccaaagtccttttttgttttgttttttctttttttgagacagagtctcactctgtcacccaggctggactgcagcagcatgatctcagctcactgcaaactcacctcctgggttcaaggattctcctgcctcagcctcccgagtagctgggactagaggcacctgccaccacacctagctaatttttgtatttttagtagagactgggtttcaacatgttgactaggctggttgcaaactcctgagctcaggcaatccacctgcgtcagcctccaaaagtgctgggattacaggtgtgagacgccagcatcagatcccatgtgctgtgcagtgagaggtgccaggcagggcacgaacgccaccctcaaccccagggcaggcagggagaccaggaagccttgcaacccagagggaccccagcgacttttgctcactccctccgccccggaattccttgtgcccctcgcctgcccgctgccagtctgaatggccatcacctccatgccacccattcccatgcatccaacctctagccccagccttcaggactgcagtctctggagcccctaggtgcatcccagcccctcccacctctcctctatccaagaagggcaccaggttctttactttgctttattgtttgtggggtgaagataaggccttgggcttgagaaactcattgtcataaagttataaactgggaaactgggtcagaaggcatagaaacaactgtcatcgcccatcctccctttctgtggatgaggcgggacaaggccggccccctggctggggcctgggacgcgagggctctcagagcttggagaaggtgacggttttcagttccttgttctcagtcgtggcctggaccgacttcacgaggtcttgggtctgcagcatgctcatgttccaggacgcctggtaccgagggtgttgagagagaacgaggagagagattagcaggggccaatcaggataaagcatgagagcaccctgcaccctggttggtcgcctggggttagaggagggctgtgattggtcggagcgtgcaccttaccacgtagttgaggctctcggccaccgaatggtcgcgggaatacagcaggttgaccttggtgctctgcaccgccacggggctcttgctggaaatctcggccgccagcgctaaggcagcatccagcatgacctctttgtctgggaacacccggctgcagtgaaagagatcagggaccgggtgggctgggaagggctctctcctccagcctcccgcagatgaagaagtggccactcacagaggaaggcccaagaccccagagaaacagcccaatcagagcagggggctgaccccacaataaagaaatgagctcaccaagaaaggatgccactaggaattctagagcgaggagacaaggggacccggagaggcctccaaccctccaggcctggctgcccccagcactgagctaccacggccatggccctacctgaccagcccactgcccagggcctcgtcagccatcatcttgcgggcggtgaaggccagctcgttgaccaggctgcaaaggcaagcgtgcatcaggaggcggctgccaccccggggctgggagatgctctggggtctcctgcccacacccccacaccccctgcacccacctctggttcccgatgaccttgggcaggcgctgcagtgttcctacatcggcagccaaacccacgtccacctcctgggggaggaatcgggtcagtgtttggtttctgcccaatactgtgcccctcgcaatgtcaacgtccatgaaatttcatgtctactggagagtcccgccccaccttcaccccagtgacttcctccaaagtcccattccattgcccaggcagcttcttgactcaggcaagttccttcaacctagaatagagcccaccttcccactcatgcaccctcccattccctcagggcagctccatctgtgagagaggaaccctcctcaccctacctgagacccctttactgcatcccccggctccatcctgcctcccaccctcaccagtatggccccaggagcaatctctgcctctgacacctgccagcctcaaccccacctcataccttacccactcacaacttcacctcttgacttcctctatgggcaagtcttactttgtcgggttcaactccgactcttccatgaagccctcgaggctcactccaggccccccaacctcaccccactgcccagctctaagcaggagctcgggaggatgactcaccttcacctggaagaaagcatcctgggcacagtaccggatgtcacaggcggtgacaaggtccacacctaggaggtagaggccagggatgctgaatgaccaccagaaccaaccctggctcccgggaggtggggctgcctcttgggacacagtctggcccatgacagagctgaggctggatgccagtggccgcggcatcggagcagcagccccacctggggagcacccgagcaggaggatagccgcagactcacctccgccaatgcagcccccatggacggcagcaatcacgggcttggggcactgagagggaacaggaagagtggggtcagggctggcccaggggaggcgcgtatggagaaagatcccctccagacccctagagtcaccctctcgatgacgttgaaggtctcctggtatcgagtgatgatgtcacggaggtaccagctgatccgggccacatcatctcctttgggctgcaggatgtccgaagccatgtccatcaggtcaatacctggtgagaaggcatgatggagctcatccaggctcccaggccccacccattgactcaaccagggatcagaacccaggcacagcaggttcgaacccccaaaccaccaaggcggaaaaaaaacaactcacacaggacttggtgagggattgattgcatgttgggtgggaaggaaataaaagctaatatttgtggagtcattactcacagaatcctcacagcaaccgtaccagctaggtcctattactatttgtgttaccaatgggtaaactaaggcacagagaggttaagcacttgcccaagggggtcacactggctggtgagtagtgagtaatgaactatttaaattaactcattaatgtttttagagacagggtctcactctgttataccagctagagtgcagtggcacgatcatggctcactgcagcctcgaactcccaggttcaagcaatcctcccacctcagcctcctgagtggctgggactgtgccgaggctgctcttgaactcctgggctcaagcgatcctcccaccttggcatcccaaagcactgggattacacgtgtgagccaccatgccgcatcagaagtaggattttaaaatctggaaccatgcagctggctccagaggccatgcttttccccaagatgccagacagcctgggactcaaggtctgcagcgtgagcaatgcagtcaatggtggtgatgtttcctgagatgagaaacatctcacgatgcagcaatttctgtggctccaacttcaagatgatcctgaatctgacctttcctgcatcagttgttctccatgagcccaccctgctctccctgtttccacctgtgtccccagtctattccctacaggcagccaggggaagccagtggacaccttcttgggtcagatcctctttttttttattttattttttttatttcagacagagtctcgctcttgtcgcccaggctggagtgcagtggcaggatctcggctcaatgcaacctccgcctcccggttcaagtgattctcctacctcagcctcccaagtagctgggattacaggcgcccaccaccatgcccggctaatttttgtatttttagtagagacggggttttgccatgttggccaggctagtctcaaactcctgaccttgtgatccacccacctcggcctcccaaagtgctgggattacaggcgtgagccaccgtgcccggcccagaccctctttttcccacctgtggctcttagaacaaaatggaacgtccttgtcatgactaccctgcatgaacactgttcccaacctgttactttgggcacactggcctccaactctgtgtgtgtgtgtgtgtgtgtgtgtgtgtgtgcactgttcccaacctgttactttgggcacactggtctccaactctgtgtgtgtgtgtgtgtgtgtgtgtgtgtgtgcgggcacgtgcatttgagcccaggagttggaggctgcggtcagctatgatcgcaccactgcactccagcctgggcgacagagcaagaccctggctcaaaaataaaaaataaaaagaaaagaaaatggcaggacagagaggtgaaaagacaagtggaaataggatccagatcactgcctgagggctgtgcagtggtacagaatcttctcattgagaaggtgaccttgagtaaagacccagaggagagggagggagccaaggacctttgggctgacaaccatccctccctcttcaacagccacagactgactccttcacttccttcagctatagctcaaaggtcacctcctagagaggccctccctggccaacctggctcaacgatggccccatcccccgcatcctgaccccgccttacctccgggctgcacagctgctatcctataattaggtccttatctgcttgagggtctgactccctttctagaatgtgagctctgagaacacaggagtttttgtctttctgtccactgctgcatcccctgggcctagcacagggcctggcgcacacgagctgctcaataaatgatcaatacagacaacagtccctgtcctcatggggaggcaaacaaatgaataaaaaagtatattttggggctgggcgtagtggctcacacctgcaatcccagcactttggaaggcagaggcaggaggatggcttgaggctaagattttgagaacagcctgggcaacattgcaagacctcttctctacaaacaatgaaaaaattagctgcacatgaggctgggcatggtcacctgtaatcccagcactttcggaggctgaggtgggcggatcgtttgagcccaggagttgcaggctgcggtcagctatgatcgcgccactgcactccagcctgggcgacagagcaagaccctggctcaaaaataaaaaataaaaagaaaagaaaatggcaggacagagaggtgaaaagacaagtggaaataggatccagatcacagcctgaggccaaagtcccccttactttttttttttttttttttttttttgagatgtagtctcactctatcgcccaggctggcgtgtagtggcgcgatctcggctcactgcaagctccgcctcctgggttcacgccattctcctgcctcagcctccctagtagctgggactacaggcgcctgccaccatgcccggctaattttttacatttttagtagagacggggtttcactgtgttagccaggatagtctccatttcctgacctcgtgatccgcctgcctcagcctcccaaagtgctgggattacaggtgtgagccacggcgcccggcaatcccccttacttttaaccagcatgccagctactcagatgacagacatttagcagctaagagcaaggactctatagccaggcagcatgagttccaaaatcccagctctgccacttacaagctgtgattattgggtaagtttcttgctctctggatctgtttcacctttaaatggggcttatagcagaacctgtcttgtggactgtgattagaattaatatgtttaacgtgcttagaaaggggcgtcacacaccatgagtgctacataattgtggccacctttttctttctctaattagtagttctactctatcactgggtcactgcatgacctgccgtttcttccttctggccttcggggtcttgctgctgaaaataagataagacggccacattcagctgggagctgaaagatgaaggacctgggcccggcacagccacaaaaaagccccatttttctgttctcagacatgatctctatgagagcaaggggtcaggaatcggggctgcttcccgtttccacatctgcagcacccaggagggggctctggcactggactgtgtcactgaatgtttgtcaaatgaatgaacaaatgaacaagaggaggaacagagggagatgcagaaagaaagcaggaggctgggtgcggtggctcatgcctgtgatcccagcactttgggaggctgaggcaggaggatcgctttagatcaggggttcgagaccagcctgggcaacatagcaagccctgcctctacaaaaagtgaaaaaacttgctgtgcatggtggtgcacacctgtggtcccagctacttgaggggctgaagtgggaggatgaggggaggtggtaggggctgaggtgggaggggttgagctcaggaggtggaggctgcagtgagctgagattgctccactgcattccagcctgggtgacagagggagaccctgtctcaaaaatgaaagaaagagagagagaaggaagtgagaggtgacagcatgctggcagcccttgctcgctggcctcagagcccactctggccatgcttgaggagcccttcagcctgctgctgcactatgggagcccctctctgggctggccaagatcggagccggctccctctgcttgcagggaggtgtggagggagaggcgcgggcgggaacccaggctgcacgcagtgctctccggccagcgcaagttccgggtgggtgtgagctcggcgaccccgcactcggagtggtgggccggcgccacctgccctgagcagtgaggggcttagcacctgggccagcagctgcggagggtacaccgggtcccccagcagtgccggcccgctggtgctgcactcgaatacttgccgggcctcagctgcctccctgtggggcagggcttgggacctgcagcctgccatgcccgagcctccccccgccgccgtgggctcctgcacagcccgagcctccccgaggagcgccaccccctgctcggcggcgcctggtcccatcaactgcccaagggctgaggagtgctccgcctgcggccctggtgcaggatccactgggtgaagccagctgagctcctgagtctagtggggatttggagaacatttatgtctagctgagggactgtaaatgcaccaatcagcactctgtatctagctaatctggtggggacttggagaacgtttatgtctagctaagggattgtaaatacaccaatcagcactctgtttctagctcaaggtttgtaaatgcaccaatcagcaccctgtgtctagctcaaggtttgtaaatgcaccaatcaatgctctgtgtctagctcatctggtggggacttggagaaactttatgtctagctaagggattgtaaacaaccaatcagcactctgtgtctagctcaaggtttgtaaatgcaccaatcagcaccctgtgtctagctcaaggtttgtaaatgcaccaatcagcactctgtatctagctaatctggtggggacttggagactctttatgtctagctaagggattgtaaacaaccaatcagcactctgtgtctagctcaaggtttgtaaatgcaccaatcagcaccctatgtctagctcaaggtttgtaaatgcaccaatcagcactctgtatctagctaatctggtggggacttggagaatctttatgtctagctaagggattgtaaatacaccaatcagcactgtgtgtctagctcaaggtttgtaaatacaccaatcagcaccctgtgtctagctcaaggtttgtaaatgcaccaatcagtgctctgtgtctagctaatctagtggggacttggagaagttttgtgtctagctcagggattgtaaacgcaccagtcagcaccctgtcaaaatggaccaatcagctctctgtaaaacagaccaatcagctctctgtaaaacggaccaaccagcaggatgtgggtggggacagataagggaataaaagcaggctgtccgagccagcagtggcaacccactcacgtccccttccatgctatggaagctctgttcttttgctctttgcaataaatcttgctgctgctcactctttgggtccacactgcctttatgagccataacactcaccgcgaaggtctgcaacttctctccagaggccagcaagaccacgaacccactgggaggaatgaacaactccggacgggaggaacgaaccactctggacgcaccgccttaagagctataacactcactgcgaaggtctgcagcttcattcctgaagccagcgagaccacgaacccaccagaaggaagaaactctgaacacacccaaacatcagaaggaacaaactccgaacacatcagaaggaacaaactgcggacatgccgcctttaagaactgtaacactcaccacgagattctgcggcttcattcttgaagtcagtgagaccaagaacccaccaattccggatacattttggtgacccagatgggactattacctatcgccaagcggtgagaccactgcctatcgctgagcggtgagactatcacctatcgccaagcagtgagtaccactggacccctttcacttgctattctgtcctatttttccttagaatttgggggctaaataccaggcacctgtctgccagttaaaagtgactagcatggccgctggactaaagacatgggtgtcaggctttctgggaaagggctctctaacaactcccgactctttggagttgggagcgttggtttgcctagaaccagcttctgcttttcctgtacttctgggctgagccgagggtcgacagagaggaaagccatgcagctctagggtcccgacaagacaacaagttcgttgaccctgcagccatgagcggaacactcaaaggcatgtcgcccaagcgagactcgcccatctatcctatctatcctgactcttgcccccgggtcctaatgcctgccagacaaacttcctctcacctctcttctccgagtttagtcctgcttctaaaatttgctgtctctggtgcttttctagtttctcctataagaacgacttctagaactctgttacattctttaggcacccaggctcaccaatcagaaagacataatttttgcccaaagccctgtcatagtggcgactacctggaattttacgatccctcctcagactaacaggcctaacaaaggtattcctgaagctaggatatggggagcctcagaaattgtagctttcctattcatataagtgaggacaaaaggtgtcactcttccaaccctggagatcccttccctccctcagggtatggccctccacttcatttttggggcataacatctttataggacaggggtaaagtcccaatactaacaggagaatgcttagaactctaacaggttttcaagaatgcgtcggtaagggccactaaatccgaccttccttggtcctccatgtggtctgagaggaaaactagtgtttctgctgctgcgttgatgagcacaactattccgatcagcagggtacagggactgttgcagtttcttgggcagggggagaaacaaaacaaaccaaaaccgcgggtggttttgtctttcagatgggaaacattcagccatcaacaggctcacccttgaaatgcatcctaagccgttgggaccaatttgacccataaaccctgaaaaagaggaggctcattttttttctgcactatggcctggccccagtattctctctctgatggggaaaaatggccacctgagggaagtacaaattacaatactatcctgcagcttgaccttttctgtaagagggaaggcaaatggagtgaaataccttatgtccaagctttcttttcatggagggagaatacacaactatgcaaagcttacaatttacatcccacaggaggacctctcagcttaccaccatatcctagcctccctatagctcccattcctattaatgataatcttcctctaatctcccctgcccagaaggaaatatgcaaagaaatctccaaaggaccacaaaaccctcctggctattggttatgtccccttcaagctgtagggggaggggaatttggtcccacccgggtacatgtccccttctccatctctgatttaaagcagatcaaggcagacctggggaagttttcagatgatcctgataggtacatacatgccctacagggtctagggcaaactttcgacctcgcttggagagatgtcatgctactgttagatcaaaccctggcctttaatgaaaagaatgcagctttagctgcagcctgagagtttggagatacctggaatcttaatcaagtaaatgatagaatgacacctgaagaaagggacaaattccctatcggtcagcaagccatccccagtatggatccccactgggaccttgacttagatcatggggactggagtcgtaaacatctgttgacctgtgttctagaaggactaaggagaattagaaaaagcccatgaattattcaatgatgtccaccataactcagggaaaggaagaaaatccttctgccttcctcgagcagctataggaggccttaagaaaatatactccccggtcacccgaatcactcaagggtcaattgattctaaaagataagtttattatccaatcagccgcagatatcaggagaaagctccaaaagcaagccctgggccctgaacaaaatttggaggcattatcaaaacctggcaacctcagtgttctataatagggaccaagaggaacaggcccaaaaggaaaagtgagattggagaaaggccgcagccttagttatggccctcagactaacaaaccttagtggttcagagaggacagatagtagaggccaatcacccggtagggcttgttatcatgcggtttactaggacactttaaaaaagattgtccaatgagaaacaagctgccccctcgtccatgtccactatgccgaggcaatcactggaaggtgcactgccccagcggacgaaggttccctaggtcagaagcccccaaccagatgatccaacaacaggacagagggtgcccggggcaagcgccagctcatgtcatcaccctcactgagccccgggtacgtttaaccattgagggccaggaaactgacttcctcctggacactggcgcggccttctcagtgttaatctcctgtcctggacgactgtcctcaaggtctgttaccatccgatgaatcctgggacagcctgtaaccaggtatttctcccacctctcagttgtaattgggagactttgctcttttcacatgcctttcttattatgcctgaaagttccacacccttattaggcagggacatattagccaaggctggagctattatctacatcaatatggggaacaagttacccatttgttgtccccctacttgtggagggaatcaaccctgaagtctgggcattggaaggacaatttggaagggcaaaaaatgcccgcccattacaaatcaggttaaaagatcccactgcttttccttatcaaaggcaatatcccttaaagcctgaagctcataaacgattacagaatattgttaaacatttaaaagctccaggcttagtaaggaaatgcagcagtccctacaacaccccaattctaggagtacaaaaactaaatggtcagtggagactagtgcaagatcttagactcatcaatgaggcagtaatttctctatatccagctgtaaccaacacctataccctgctctctcaaataacagaggcagcagaatggttcacagttctagacctcaaggatgccttcttctgtattcccctacactctgactcccagtttctctttgcctttgaggatcccacagaccacacgtcccaaattatgtggacggtcttgccccaagggtttagggataggcctcatctgtttggtcaggcactggcccaagatctaggccacttctcaagtccaggcactctggtccttcaatatatggatgatttacttttggctcccagttcagaagcctcgagccagcaggctactctagatctcttgaactttctcgctaatcaagggtacaaggtgtctaggtcaaaggcccagctttgcctacagcaggtcaaatatctaggcctaatcttagccagagggaccagggccctcagcaaggatggagagggaggacagggaggagagggagaaggaggggaaggaggggaaggaggaagggaggagagggagggaggggaaggaggaagggaggagagggagggaggggagggagaaaggggagggaaagaaagaaagggacctgggaatatgttaatggacaaaacagaaagaaatagtttactgtctgtcttccccactgagttgggaacgccatgacaacagggcctgggactgtcctagtcaagactgggttcccagcaccaggctctgggccctgtgcagaaatcagtgtatgaaatattttgcttctggttcagtcctaaagggccaaccctcccacggacaactacatacgctggctggacaagaaacaaacaattatctgaaggcactgggcagattctggagggagtgaccacttaggagagtggcagaacactctctcggtgtttttgaaaatggttttgaaaactttcagcctgagggcagactgaaattgtgcttgaagagccacaggatagagtccaaggtgaccaaagctgccgggaagtgaggggggatattccaaagaggggagagccagagcgaggagtcccgaattctgtgtatcaactctgccctaatctcttgctgggagatgtatgtttttgttgttgtttttgttttgagatgggttcttgcactgtcacccaggctgggtgcagtggcacgaccacagctcactgcagttttgacctccctggttcgagccatcctcccacctcagcctccagagtagctgggagtgtggtcattcatcacacccagctaatttttgttagagacaaggtctcagtgtgttgccctggctgaagattagtttttaaatcttttgctgggggtgcatgtatggtctgtaaatcagcaagaagccaggcacagtggttcacgcttgtagtcccagcacattgggaggccgagtcaggaggatcgcttgagttcaagagttgaagaccagactgggcaacatagcaagacctcatctctacaaaaaaataaaaataaaaacagaaaaaccaaaaaaactaattccaactaagctaccaaaacacgaaactcaacactctttggaactatatgatagaatccagagtatccacatcttattcctatatcccaatatccaagaaacaatccaaactaactcaaaatacaaagaaacaggaaagtgaagccgttttcttttttttgagacagagtctcgctcttgtcaccaaggctggagtgcaatggcgtgatgtaggctcactgcaacctctgcctcctgggttcaagcgattctcctgcctcaggctctccagcagctgggattacaggcatgcaccaccacgccgggaaaatttttgtatttttagtacagacggggtttcaccatgttggccaggctagtcttgaactcctgacctcaagtgatccacccacctcagcttcccaaagtgctgggattacaggcatgagccactgagcccagcctgccatttccaagcgaaaagatgataaggagactgaccccaagatgacccagatgttgagattagaagataaggagtttttgttttgtttttattttgtttttagagggagtctcgctatgtcacccaggctggagtgcagtggcgccatctcggctcactgcaacctctgcctcccaggttcacgccattctcctgcctcagcctcccgagtagctgggactaaaggtgcccgccaccatgcctggctaatattctttttttttatttttagtagagatggggtttcaccatgttagccaggatggtctcgatctcctgacctcgtgatccgcctgcctcgacctcccaaagtgctgggattacaggcgtgagccaccacacctggccagaagacaaggattttaaatcagtcattataactatgctcaatggcaggaagaaaaacatgcatgacaaaaaatatacaactgaccaggcacagtggctcacgcctgtaatcccagcactttgggaggccgaggggggccgatcactggaggccaggagttcaagacccgcctggccaaaatggtgagaccccgtctctactaaaaatataaaaattagccaggcgtggtgccgggtgcctgtaatcacaagtactcaggaggctcaggcaggagaatggcttgaatctgggaggtggaggttgcagtgagcccagactgcaccactgtactccagcctggtcaacagagtgagactccttctccaaaaaaaaaaaaaaaaaaaaaaaaaattagctaggcctggtggcgggcatctgtaatcccagctatgcaggaggctgaggcaggagaattgcttcaacccaggaggcagatgttgcaatgagccaaaattgcatcactatactccagcctgggtgacaaagcgagactctgtctcaaaataaatgaataaataaaataaaataaaatatgaaccaaatggaaattggagaattgaaaactacaatatctgggctgggcgtggtagctcacgcctgtaatctcagcacttttggaggccgaggcgggcagatcacgaggtcaggagatcgagaccatcctggctaacacggtgaaaccccgtttctactaaaaacacaaaaacttagctgggtgtggtggcaggcactggtggtcccagtactcgggaggctgaggcagaagaatggcctgaacccgggaggcagagcttgcagcgagccgagatcgcaccactgcactccagcctgggtgacagagcgactctgtctcagaaaaaaaaaaaaaagaaagaaaactacaatatctgaaatttaaaatcagtgggtagtagctgggcacggtggctcacgcctatcatcctagcactttgggaggccctaggtgggtggatgacctgaggtcaggagtttaagaccagcctggccaacatggtaaaactccgtctctactagaaacacaaaaaattagccgggcgtggtggcgggcacttgtaaccccagctacttgggtggctgtggcaggagaatcacttgaacccaggaagcagaggttgcagtgagttgagattgcaccattgcaacaaaagcaaaactccgtctgaaacaaaataaaacaaaataaatcactggatgggctttacagaaggatagagatgactaaacagttagtaactgtgaccagtggaaattctccaatctgaagaaaaggtcagtgggtcaatccaaagatccaactgacctgtaactggaaatcaattagtgagttgaatagttgcacgaaagcatgttattatattatatgctgacacagctataggctgagaggttaagcatgttgttcatggccacagatccaggatggaaacctagacttcagagcctatgatcccatcgtgttctgtcagactaatacttatatttgaatgttttaaagtaggcctttttttaaaaaaatgatagggctggccatggtggcacctgcctgtaatcccagcattttggcaggctgaggtgggagaatcgcttgacctcaggtatttgaggttacagtgatttatgattaggcaactgtactccagcctgggtgacagagaaagatattgtctccaaaaaaaaaaaaaaaaacacacagataaaagtgtgagttaggggccaggagcaatggttcaggcctataatcccagcactttgggaggctgaggcaggcagatcataacgtcaggagatggagaccatcctggccaatatggtgaaaccccgtctctactaaaaatacaaaaattagctgggtgtggtggcccacgcctgtagtcccagacagaagaattgcttgaacccgggaggtggaggttgcagtgagctgagattgcgctactgcactccagcgtggcaacagagcaagaccccgtctcaaaaaaaaaaaaaaaaagtgtgtaagtcagaagctgcttaaaaccctaattcagaagcactgctccactgtctattgccaggagctaggaaggctggcagggtgtgtgaagagcgtctggtacctgcagtgaacatttttcctgcaccagagatcaccaccgcccgacagtcagcgtctctcgaaatcttgttgaagcactctaccatctctctgtgaagcaacgagtgaagggttacaaatggggcgggaataccctgccctcatgtccatcttcccacaacgttccactttcacccagtcccgcagccccgcctccccccgcaggcaggcctccaggatctgcaggtcagacctccagaagaccttgttcatggcattcctcttgttgggccggttgagctggacatgcagaacatgtttctgcgcagacgtcacacgaagggactcatagctgtggtctggggcttcaccgagggctactccggaagcctcctcttgtgcagaggagccagtgaggcgaaggctaatactgagtcccgggtagttggagcctgtcagtcctggggagaaaggaacagcctttgatgaccccagactgcaagacacaggcctatcgaattagggagtccttcaaaagggagcacacgcacccctgaatttaggggactcgggcccttcgtgaccccggatagccctccccgtcctacatctgctataacagcacgacagcgcgacgcacccccataaggcaagaggtgactcacgccgggtcagtaggtcgcggagtctgcgagaagccactatccccgccgccatcgccgccgccttcgtctactgcgttcggacggagtaacgtgcccgttagcggagggggcgggcacagaaggccgccatgttgagcgagggcaccgatgccgcaacctgacaggcaatgacgccgttctttccgccatctttactaagggcagtcgatttccggttgccttacatagagccaggctcagaaatggaccctttgccccagtgggaacctggccaaagaaaatagctcctgcaatggcgtgaacctgggaggcggagtttgcagtgagccgagatcgcgccattgctctccagcctggcgaccgagcgacactccgtcttaaaaaaaacaaaacaaacaaacaaaaaaaaaaacagaaaagcaaacagctcccgctaaagttcatcacacagctgtttcataatggtggaataataggcgacagctgaaatgtccaaggacataattgcagcagagcttgtaatcatgcatgtatatatcatgttaactaaaaataaaagaaaacttgcagtactgtgagtttactcaggtaaaggaatgagtacagacgggccaacattaagcgctgactgtataatatgaactcccaccaggaggtcgtactatttcctactatatgcagaggaaactggcccaggcacgggaagacactaggttcaaggtcggtgggcttcagaagggctaaagcaggattacctggcaccagagttcatgttcttagcctggcgcagtggctcacgcctgtaatacaagcactttgggaggccgaggcaggcggatcacctgaggtcaggagttcaacagcagcctggtcaacatggcgaaaccccgtctctactaaaaatacaaaaattagccgggtgcggtgtccggcacctgtaatcctagcgggaagagaatggcttgagcccaggaggcggaggttgcaatgagcagagatggcaccactgtaccccagcctgggcgacagagcaagatctcaaaaaaaaaaaaaagaagaaaaaaaagttcatgttcttaaaaaaaacaaacaaaacaaaaaaaccgaaattcccttgggaaaagccagctaccaaaaggcataaaaagtactgtaaaactgctggccgggcgcggtggctcacgcctgtaatcccagcactttgggaggccgtggcgggcagatcacgaggtcaggagatcgacctcctgacctagctaacacagtgaaaccccgtccctactaaaaaaatacaaaaacttagcgggcatggtggcgggcgtctgtagccccagctactggggaggctgaggctggagaatggcgtgaaccccggaggcggagctcgcagggagccgagatggcgccactgcactccagcctggggacagagcgaaactccatctcaaaaaaataaaaaaaaaaagtactgtaaaactgcttaagtatgctttttggggagacattgagcaaggcggtgaacagatgtctctgggccagtgagattgaaggaagtatctttccttaatgaacctgtctcctgtgtgttttcacagactagaaaagcaggctcttttgaaagacagaaccattaactacccatcaacagtagactgtttataccatagaaaactctgaaacctctatgcaaaaataaaaatgtgtgagaaaaaaatgtgaagatgtaatagaacatttagtatgatcctttgttcctttggtgtaagaaagtatagctgggctgggtgcggtggctcaggtctgtaatcccagcactttaggaggcccaggcaggcagatcacctcaggtcaggagtttgagaccagcatggccaacatggtgaaacccaatctctattaaaaatataaaaattagccaggcgtgttggctcatgcctctaatcccagcactttgggaggccaaggcgggtggatcacaaggtgagaagatcgagaccatcctggctaacacggtgaaaccccatctctactaaaaataccaaaaattagccgggcgtggtggcgggcgcctgtagtcccagctattcgggaggctgaggcaggagaatggcgtgaacccaggaggcggagcttgcactgatgtgagatcacgccactgcactccagcctgggccacagagcaagactctgtctaaaaaaaaaaaaaaattagcggggcgtggtggcaggtgcctgtaatcccagctacttgggaggctgaggcaggagaattgcttcaacccaggaggcagagtttgcagtgagctgacctcatgccactgcactccagcacttcagcctgggtgacagagtgagacaatgtctcaaaaaaaagagtgtagctggacctgcacagaatatggtgtatgtatgtaatatctctggaaggagactcaaactggtaacaggaaatgaaattggatgctaggagacaaactggtaaaattcactttttatcaccttgactggcttaaaaacaataaaccctagttgattttatttatggctgcaagatgactgtagtttttccttgtctaaagattgtttgaaacttcccatagtgaagcaaaacttgttcatctgccaaatgatgcttttgtgatgtcattaaatgttaaaaatgtaaggccgggcgcagtggctcatgcctgtatcatagctactttgggaggccgaggccagtggatctcaggagttcgagaccagcctagccaatatggtgaaaccccatctctactaaaaatacaaaaatcagccaggcatggtggcacatgcctgtaatcccagctacttgggaggctgaggcaggagaattgcttgaaccaggaggcagaggttgcagtgagccaagattatgccattgcactccagcctgggtgacagagcaagactccatctcaaaaaagaaaattttattcacagtaaattccccagagtgggctattctcaagcacacatgcataaacttcaaggtttgtgacctgctcctctgcaggtcacctcttccctccagtaggagtcaaaatccttaaaccaggatccttccgggtggtacccgccaccgcaaggcatcttcacagatttgcatctgcaagtgggaagctatctaccgtatgatgcaattatatagatcctttaagttttgagacatggtctcgccctttcgcccaggatggagtatagtggtgccatcacagctcacagctcaagtgatcctcctgcttcagcccccatgagtagctgggactataggcacagtgtgtgccaccatgcccacatcatttttctatatatttttttctcgagacggagtttcactctcgtcactcaggctggagtgcaatggcacaatctcggctcactgcaacctctgcctcctgggttccagcgattctcctgcctcagcctcctgagtagctgtgactacaggaacgtgccaccatgcccggctaatttttatttttttagtagagacagggtttcaccatgttggccaggctggtctcgaactcctgaccgtaagtgttccgctcacctcggcctcccaaagtgctgggattacaggcgtgagccaccatgcccggcccactttcttattttttgtagacagggttttgccatgttgcccaggtctcaaaactcccggccttaagtgatctgcctgccttggcttcccaaagtgctgggattacaggcatgggccactacatccagctatatatatcctttaacccagcaattccactggcaggaatttatctcctgatcagtatcagggaagctggccaagatacttgtgtagatacgtgttacagcgctgtttgcaatagcaaaaatagacctggaaactaccctttgggaccaggttaaatcatgacacatccacacaatgatactgcaagggtaaagacaagtcactctgaaatgatacagaacacaaaggttttgggtttttttgacaccctgttgcccaggctggggtgcaatgaccccatcacagttcactgcagcatcaccctccagggttggggtgatccacctcagcctgctaggtagctgggactactggcatgcgccactatgcccggctgatttttgtatttttagtagagacagggtttcaccatgatggcaaggctggaaacctttttttttttgagatagggtctcattgtcacccaggttggagtgcagtgatgtgatcactgcactgttaacctcctaggctcaactgacccacctgcctcagcctcccgagtagctgggactacaggtgttccaccaaacccacctttttgtagtgacgtttcaccatgctgcccaggctggtcttcaactcctgagctcaaagtatgtgccccaccttggcctccccagattgctggaattataggtgtgatgacccactgggcctgatagagcttgctcgggcagggcccagtaagaatgccactaagcctgatggattttcctcaaagactcaattgctagcaccattctcagtctgcagcccaccctgctcctcttgggtctctgtatgcctccagagggcctgtgactgtgctcaggcctgcctgtgtcttcaggacagagagggagaaaagcagacatcctggaatcccagcaagtgctgtgtttattttccaaacaattttattgaaatgtgccaagagtacatgggcagcacaaatgtatgaacaggaaaaaaaaaaatcacatgtacaataattttttaaaagtgaaggttaatcttgggagataacagttcccctctccctccccctgcagatttccagcgtttccattaaggttaagtaagcctctacaaacctagcatttaaaaaaaaaaaaaaaaaaaaaaaaaaggaatacaagatcttttgcaaataacaaaaacaaaaaatggcataaaggaaagagaaatgtcttcctgctcagatgggactcttcctaggcacctaattaggaggcgtgctgagcagtggagaaacacaacttcagagtgtaagggtatggaccatctgcaaaggagagacaagtttggttggttcccgtctttggaggctccccaaacccaggtcccctcaagtttgtacccatctcccattttctgcaggtcaacggcaggggtctaaggagtgactgcccaacgtgaggcttcaagatgagccaattaccaattatgcacggcgtttctccttctcttccttcattcccatagagaatcccattcctatctccttcgccagcccaaggcaatgggcctctcccagcaactgggtgggcaagttttacctgctggatagtgttgcctctttcctaggtaacagagtggctttcctacctaagccagtctctgatgcaaagaagagaatgccacctccctggaggacaagcctgagcaactcccaagctggcagagtgagtggcagcaggcagtcaggctggctctcccaagaggagcacaggctgctctcctgatgagcaggtcccacctgcctgtgtcaccaacagtgcgaagatcccggggtcctatctcaagggcaggaaggacatccctggcctgaagccagccaacccattaggtcaccaggttgatgcctgcaggacacacagatactcacttgggtttttcatctggtaatggttcaggaagcccagagtctccagggcatcgctcttggattcccactccagcagtccagaggagctgcgctcacctgattgcaaaccaaggggaaaagtaaaggttttagactcacccaataggaactaggcagctgcccaccaaccaccatgcaattagggcaaggaggtgggcacactcgactcacttttgcctgagaatactttcacagaagatggccgcttcactcccagctcatcgcagatctgcaaaagaaaacaggtagtaaatgaactctgaaacaaaagggccgccacacaggattcaagcagaccaggccctgcatgactcagtacttgaagttttcaggagaaaaggcttgtagattttatcacataccctaaggcatccctgtgtcataaaaaggccagcaacaatgctctttaattattaagttgcctgagactgggaagctgctttttcgttcccaacttcaacagctatgtggatatctgcacccggctgtttgctgaacactgtttgctgaatgcaaggtcaacatttcagaccacagccagatccacttgagttcctcctcccttccgctgcctcagttccccctgactgagctttacagggccccaccttctgatggtatcagggtgatggcacccgaagcctacgccaatgcggttcttgtgaaattgggccctcatcactgggcctgtgaagcagctttcccagcaaacgagcagttgccctgcttgccaaaaatgtaaaaggaaggaacgcggcaaatggtgttgctagaaacttggtgccattctcaccctgtccagtttgagagcacagattcctatctgtcctggcctctgctgtgtccctagcactcaacccagggccaggcaggacaggagttcaacagctatttgcagaaaagactgaaatgaatggcctactcagacggccgtggcaaggacccgactgcctgcgcagctccacggcacacacctcaaagaagttctcctcggtcacctccagcggggcgttgaagaagtgcagcacgttgctggggtgctggatgcggttcttggctgcctgctctggggtggagaaccgattgttccgggattcactgaagtctttgtaactgcaagacccgtcttccaacccgtatgactgaccaggcatgatggctggctgcttggagacactgcagcaaggaagaaaggggagcctttgtcatacccaaagttgtccctgaagctttcccctgtggcctccagaggcttagcttgccctgtgtgccttggggcattgctctacacctgaggcaaggctgactcactttctcctgtggtgtcagagacacgtctgggaacacacctgccacatcccatttctgtgtgagtcaacacctcggcctcactgtgctcctctgctgggccccattcccctccttttctctcccctgtacctctgctgccctcccgagcctgagcacctaccagacattcagcttctgcccaaacatgaagttgttgttgaggtgggtaatggcccggtctacagcgtagccatcagccatctccaccatggcggcccccggcttgcttttcatgaatttcaccttggggagagtagctgcagtcagcacctctgtccagctgccagggtcccctctcctgcccctcccaagttagtgataataacccctgctctggcctcccatgtcctcacagttaatcgggaccactagaaaaacatgcctggcccacaccaagtgctcaacccatagtgagaagcagagcctgggccatgtttttaactgtgggacataacccaccagtaaatcatttagtgaagcatgacagaaaactgtacaggaatcagaaatcaaatcagccattttcaccattttgtctgttacacacagacgtgtgtgatctatggatggctgtgtctacagtcacaaggtaaaatactccttcagctgggttacaacagagcagtgccggctctggagccaggcagtctggctctgagtcctgcttcacataaaggctatgtgaacctgggcgcgttatttaagccccgtcctccacttcccctgtccatctcattaaggattaatgtgagaaattacacaggtcactacatgtaaagcatctttaacagtgcctggtaactaacaacacttcacctgtgttacgaactactctaagtaatgggccaagtcatgagctgcacaaaggcccccaagacccagacgggtttaatgttaagcaaaatgccgcctggtctcaggtagacactcagccaccgctagccccagtcaactgtcccatgggaaggcagaaggcccggtgttgccaggtcttaagttttcaggaggaaatccttaaacgatggtgtttcactataatggattcatttttatgttttataaatctctatgttcatgtactggtattagtacttttatgtgataaaatcttttttttaaacattggtaattcaaaaacacaacacccacatacagtgaggaccaaacaaaacccgtctgcaagcaggctgcctgagctcactgagtcactcattggcgtctgcccgcccagcgccacaccaggctcccccctggttctttcccgtgctgactggcaagatacgaggctcagcgaggaacccagggggcccggcagcagctcaccttctccacattgccatataagcagaagacattgaagactcggtcacagttcatcttagattgatccaagccatagaccatgagcacagggctgtcggcgtgagggccatactcgggtggtgggggagggggtggggggtgcccatactgggggccgtagcgacttgggccccgacggtgaccccccactggtggacccatccttctcccttcgtagtgaggtggggggggcccgtagccctcatcatggtaatggctgtggtacccaccgtggggccctcctggggggtgggaaggaaagagagggaggacgggtgagaatttgcacggcgggcggcgggcaggggcacatgagccacgggagtccacggaggggaaccccctgccctcaccatattctgcggggtgatctcccaggagagggggctgcctctggcgtttgttggggttgctgccagggtcacctgtggagagagaaaacagttaggagtctcactcagaaattggggtctctccctccctcctgactgcacaggctgatctgagcccccagctcctgccaactgcaagccctcccttcctcgagggctgtggggcctccttttgtgatctgacctacggcgggcatgaagcccgagcctcaaagctggtgcccactctccttcccctgctcataccaaagggctggccttgttctgtgaaggacaaggccagattctgtgctctcacctaccctggccctgggagaaagcccagctcccaggccctctggggaatgtgcagctgctacagaagctgatatattatggcgggccaaaagcagctttctaaagtgactcccaatgaagggagagtagattaagaggaaaataaccccagagggaagcaagcaagtttgacccccaaagcccccaaagttctaggagctccagactgtctctgttagatcccttctttcttaatcccagtcccccctccctcccagtcccgccagcccaagagggactgactgtagctgacaagcagggcaacagcagaatcagttcaaataagcaatcatgtacaaggcatcgacattcccacacccagcaatggcgcagatccaccccgaccccagcagttcgtaatcactgcctttaacttagcgcttaagtggcaggcactgggctaagcgctttacagacatcacagcttctgaaattcctcacaacaaccctatgaggtaggttctgatatttcagccccattttacagataagaagactgagttgttaacttttaactgagcagttaaaagacactttggcccaaagtcacaaagcaagacagtggctgagccatatttgaacccaggtctggctgactccaaaacccagggctcgaaaccactgccctttcctgccacccggcctgggttttgttaccagtcattacaaaatggaaaaggactacttacagcagaagtacagagtacaatgtccatttgtcacaaaaaacaaatctgtattttctcttaccattggacgcttcaacagtgagttagcacagttctgaaagatggcgtcccatcaaacatacactgcgaccctgcatcacatggttttacagtcataaatacaagtcacggtacacatccgctacaatttttttaaagaattgttttaaaagtcaatattttgattaaatcaaaaatggctcacagatgttctgtcctcagaagatatcagaaaagtggaaataaaggtgtatgaagtgggtagtgtccctccatgttgtcacctcctcacatatgtgctgcagtgcggtggtgcggtgcttctggctgtgtagcgctccgtgtgcgtgtctcctggtatgaggtgtgccagtggccccactacgctcgcgcttttggccttgggagcgcgcctggttacccggcagcaggtaactgtgtgcctctgagctgtttggctgtctggttttaggtctgttttggtttttttgattttttttttgttgtggttaaaatttttttttttttttttggtttctgatctccagttggtgcagattatgttggcagccggtgactgcagaaaaaataaaaatatcaaaacagaaaaaaaacaaggccctccccaaaccaaatgacttaaaaaacaaaacccatatggcgaggaatggagagaggatcctattgtcttggaggcccatggaatctacttccgtctatgaaacgttctccgaaaagagcatcgctcgctggctggctgggacagctctgttctctgtgtttcctacttctgtgtacattctcgggttcaagtttgcttggattttgaccttttttttaatgtttaataaaaaaagcagtgtctgctgccatgttgcgtctctttctctctttgtctctgtatgcctctgtctctgtgcttgtagctgttccttggagcgcggtgtggtgttcttgatgtagtgagctcaagtctgcggctgtttctggggacgtggtggaggctgcatgttctgttctctccaggaagagctagtggttttctaccctgtgtgttggtgagcaatgtgcagaggcagagccgctgaagtatggttcctgaggggtggcgaagcaccgccctcactccaggtcacctcatcagccctcgtttttttttgggccccagccttggggctgccaaagctgagaggcatcaaaaccaatgcacagccagccccctgccactagcccctgccggtctgcacatcttctatttatgttccttggagaagaaatggttgttgccatgtttctgttagcagtcatgtaatgccattgcccgctctggtacattcacttggtcaccaatttgcctctgacctttggagggagcagccaggcccacagggcccactgtgaggatcctggggaagagtctagcccaccctgcccactgcttcccagatgcaagggcgagcaagacaggcctgcctaggaatggggggctctggcctctcagggcctgtgcgatgtcagcatcgagcctcctccctcagcccatggcctggtccgacgtatcagaccaagacagacaccgagatggatggtcttgttggggggctgccgctgtttctcataggcaatcctccacctctccctgctaccaaaggcaaaccattcttgacagacactaggaagggagttgtccatttgggccacctgcagagatgttgcgtcccctctacaaatgatgtgaggcatgtccgccctggtccaatccagagtgtctcacctccacagggtcagcttgctcacaaggctcactgcaagagcccaggagacctcatcgccccccaacactgtcactcccccaaatcagaccctctcaacagcgcagaacaagaggacaattcctggtccagcaagaatggagtgagtgaccctcaccagactctcaaaggagccactgctggtttctaaggccgcccccacgcctcatcctcagtgaggccctgctccccgcccatccaggcttctgccttgcctctgtatcctgagcagcatcggagggccccaagcagcagtgaagacccatggaggcctctcactcccccatcccactagggtgtccaagtgctgaccccaaggccctcccatgtccatggggggcccaatggcattacataaccctgagcccaggcctattaagtgcactagtcgagtgaaagcaaggcgggtatgtttagaacaaagtggtcgtcaagattaccttgtccactgagattggggtttgtgtagtcccaagtatcctgatcattcttgaacacattcaagcgtgtaggctgcaaggacaggacaagacaagacttgaggtcagccatgccccagctcacctggaagctgacaaggggcagtcagtcacctcccagatgtacctttgcgtattcgatcttcagagtgcaacagccagaatagatatcagccccattgagagaggccttggcccgctgggcactttgaactgagtcaaatgtgagtcaagttaaggaaagtcccatcacaggagatctttgagaagggcttcaagttaccccagagtgtgataaggacaaggtagcaccccaagactgtggtacagacggaagctttgggattagctcactgcccagccactagcctcaggttaagagaccaaaacggtgttgatggactcaacgctgccccgggtgagcagtcactggccagagttctctcataatctgcaccccgacccatggccaccagcaacctcttctgccacaccactttctccgtctcagccctctcacacccttcgactaaatctgaaacatcaactcgattacagctctgccctgaaagtccatcagtggctttttcctgcccctgccccaagcatcgcaacgctgtctaggatgccctaaaagcttcttccaatgtctattccaaacccgtctgcttgccagccactttgcaatcctcaggtctttcaatttctccatccaacacaagctccttctgactttacaacctttgcagaggctgtttcctccaccttgagtataagctcctatttgctcataggacatcacctcctcagcaaccttcacacatgccccaccttttttttttttttttggatatggagtctcgctgtgttgcccaggatggaatacagtggcacagtctcggctcactgcaatctccgcctcccaggctcaagcgattctcctgcctcagcctccagagtagctgggattacaggcgttcaccaccatgcctggctattttttgtattattagcgacagggtttcaccacgttggctaggctggtctcgaactcctgacctcaggtatctgtccacctcggcctccgaaagtgctgggattgcaggcatgagccactgtgcccggccccatatccccttttaaataaattccttttcccaggggcacattttctcaggacctcttgagactatgttccccaaatctttgtcactcatatttgaacttagaataaacatctttaaaaataaattcctagccaggcgcggtggctcacacctgtaatctgggaggctgaggcaagtggattgcctgaggtcaggagttcgaaaccagatctctactaaaaataaaaaaaattagcaggcgcctataatcctactaggaaggctgaggcaggagaattgcttgaacccaggaggcagaggttgcagtgagctgagatcgcaccactgcactccagcccaggcaacaagggctaaactccatctcaataaataaataagtaaataacagaaagaaaacaaaaagaaaaataaattcctttgtatctcccaacacactgctctctcccctaagatctgcacgtccacacgatatgcctggtcctttaactgcctccctactcagtcactgggctctgtgaaggcatctggcacatggcagccactcccgtggtcagcagacacatgctggctcaaagaatggccactgtcaagccctgcaagagtccctaccctaaggaacacctgttttccagcaaaggatattccaccatcgcctgaactccattcttcctgaaaatgacaattctctggacagggccacaaggattacagatagtgtaaagaacatcctgcaaaagcaaacacaggcaagatgaaggggcactggcagatcagtctggcttgggggagggaataaggggagaaaaggaagggagacctcacaagaaatgcctgctggcacgtaccgtggtgatcgaataaatggggttcaggatggtaaagagaagcacactgttcacgctccgggagtcatccgagtccccagggcgggagatcttctggctggtagagtagttgacaaaagctgggtgaccagcaatgtatatttggttgtcggctgcgtagttcactgcgttgcaagcccccaacacatcttcaaactccaccagtgcttgtctctttttaggcattaccaccacatagctggcagagagaacacaggtttcaatcctctcaggaaaatgtagacaggaggagggtatcatttgattttttgagaactgactcctccatggcctctgaactcctctgcaaccctatcatggttccccgacctgaacaccctgtgccacaagtagtaccaaaagccaaagaggtctagctgagccatcatgtccctctgggaagccttcctgacctctcctcaccagactgtcagatgccacccacagacggcttcttgagcttacactatgacagtgcaaatcactctaggagggcaactttctaagagaagcatccagatacagctcactactgtatttgcagtatatagcatgcaccaaatattcagtaactacttgctgaatgaaagaacactggccaggagcagtagtagctcatgcctgtaaccctaaaacttgggagggctaggtgggcagactgcttgggcctaggagtttgagaccagcctggccaacatggcaaaacctcacctctacagaacaatataaaaattaggccgggcgcagtggctcacgcctgtaatcctagcactttgggaggccgaggcgggcagatcacgaggtcaggagattgagaccatcctggctaacacagcgaaaccccatctctactaaaaatacaaaaaattagccgggtggggtggccagcgcctgtggtcccagctactcgggaggctgaggcaggagaatggcgtgaacccacgagacaaagcttgcagtgagctgagattgtcactgcactccagcctgggcgacagagcaagagactgtctcaaaacaaacaaacaaacaaaaaatatatatatgtaaaaattagccgggcatggtggcgcatgcctatagtcccagctactcagcaggccgaggcagaaggactgcctgagcctgggtgagactgcaccactacactccagcctgggccacaaagcgagaccttgctctgtctgaaaaagagaacactgactagaaactacaaggcagaggaaaaacgaaggaaggaaaaagggtcatggaacttgctgtaatctgacacaaagtacaatggccaacccaaaagcagagcggccacagaatctagaccaggatggcaacaaaatcactatttccaaccagaaatcgtggacacacaaggacacccaggagtcaactttggaagcccaacacctggcctctgagcccagtacctgatgggtccaaactcctgcaaggcctccacaaggtctgcttccaccacaccgtcaatcaggcccctgatgtggacaactggggaggcaggggttttgtgcgggtcatcgtagttctcctgagaaaggaagcaaaaacaagaattattttcttgctgtacaagatgacgccccactggcctctgtactgttgtagacccagtcagataaaacagttggaggtcatccgtgaaggatgcacaggaaagactaggggcagcaattgaagccaatcagcccagaaggattctgggtcagcagaacagtggtcctgagtgggtgatcacttgcccactggctcttgctgtagcttctgaggaaggtataacggagggagggccacacaagtcccaaatcttacgttcttccagggacccccctctcttcccactggtccactcgaccaaggaaacatgggaaaagagtagctggaaaaggagatacactggcagcaagggctctaacagctatctgctacagtttgaatgaggacatcccctttgcatgtgccccaaattccttgccctttaactggctgagccaccatcatctagctaagcacacctgttccccaccactcacacccaggttcagtcagggcaaaaaacaacacatgccccagaaactggggcagccaggccagtcttgaccccttctagtcttgaatcgccctcccaccaaaatctgctttggaaattactgcctaggtcagactaagaaaaaccagacaagaaaagtcttttatttattttttgagatggagtctcactctgtcacccaggctggagtgctatggcgtgatcttagtccactgcaacctccgcctcccaggttcaagcgattctcctgcctcagcctcccgagtagctggaattacaggccctcgccaccacacctggctaatttttttgtatttttagtagagacggagttttgccatgttgaccaggctgttctcgaactcctgacctcaggtaatctgcctgcctcagcctcccaaagtgctgggattataggcatgagcccccactcccggatggaaagtcttttagaaagaccagagactccaacccataccattaagaaccgactgctccttcctaagagaagtatcttacacccaccgacaaaagcctctggtcatcaggagaaagattaactctcttccgcctctcctgggctctggggccggccccctgtctgagaatcactgggcagaagtgcgtggaaggtgggtagaattggattctatttcaggagcgatccacgcgaaccacagggtgaggcactcccgccaggttagcagctcccacaaatgggagttctaactccagccctgcccctcactagctgtgccacctacagtaattcacctcatctcatctctctcctggcccatttcctcctttgtaaatcgggaatcccagtatctcccccaacctcaggaagcgttaaggattttcaattaagatgtctttaaaatgtgtgggacaaggccaagattaaaacgctagcaactcgtaacccctaaaccctggaaaaccctgcaaataggcggccctgtaagacttcaagattttggaaagagtggggactgggccccactccaaaagcaacgactggtgttttcggagggactgattacagggggtcgaaatgcttccaacatggccaggaaatagtttggtttatcaaatcctcggtacccagtgaatccccggaaactgtaagcaaacttgtgatggtttcaaggcttcgctcaactcctaaaaggctaaaagtgcatttcacaagtcctcttcccattttcaatgcctacaaaaatgagagcatctaggctcaaacacatccatttctgtatagacacaaggctgggccttagagattaagctgccatcagacggaattccccactctagagaacaaggccgccgcccacccgttcccgctcaccaggcgctcccctaaccgcccacgaggccgggcgggaacactgcgcctgcgcatggagccagcgaagaaaatgataaaggggaaaaaaaccggccgggccgcgtgcccggcccccacacgccagcccgcggcgcctgcgcactgggccattcgcctcacgagctacttcctctgcgctcccccacaccccgctccggaccccgcgcacgcgcaggcgcctgtcctcgcgcaaaccccgccgtttgcccaacggccgcccctcccccacaccgtcaacgacgcgatggcctgggcgcgtgcgcagaggcccccctcaaaaaataaaatgccctcaagctgggaaattgtcccccagttcccggccttcccagcgcctagggccctggcctcaccccaccgccgccgccgcccgccgccccggctcctccaccgccaccgccgccgcctccgtgctggtcgccggcgttgtcagtcttgagccgcttaggggcccggccgccctcactgccgccgccgtagtagcggccaccgccgcctccgccgcccgccgccgccatcttcaccatcgctcccgaccgcctccgctgctcgtccggctgctgcctctgctccagccgccgacgccgcttctccgcccggggcagcagcctccgcgacatggcggcgcagaacccgcctccccccgcctctcattgggggagggacacgcccgtcacccgccgcccccacccgatagggggagccactggtcccgccgcggggggagggtaggccgccacacgccttgcgcgcttattggacattgcccacgccgttctgcaggagggcccgcccttgtttgtctgagacactccttataggtggtcgctttctgccagtctttccgtcgaccccgccgccttaaaataaaatccaatttgataggtcggatttctggcgctgctggcctccctaaaagcacctgataggaacggcgctctaaacctcccaagaatctccgcctccctcccactttcattggtctcctcgctaatccgtcagcaccagtcacaatgacgaccttcccgcgccacttcgcaaggagacaaggaagccccgcccttttttggtctctctccagtggtggttacagatgcccattcttctgcgtctccactgattggtcaatggagagtggagcgcaccctctcaccagatggtaggactgttgatacgctctgattggatgaaatggggagccccgccccagggtaggcgctctttggtgcagtatacgaaacgagcgaaggcgagaacgcatgcgcaaatacgctttcaggcaccgcccagaggcggggcccccttatggagcgaccgctgtgtgtgcgccggaaggctagaccaagattgacaggaactcccagggtatctctgtcgccatcactataccgtgttcatttctacctctaggaggaattgttaaaatcccaaatctgagccttttcctcagtagaaaaccactcgctgctgccgactgtcttcggaccctgtccagttctaaattcagccgcaacccctttcagtttcccttgggagaaggctcttccgcgcactctccatgtgtgcccatgcagtcccttccacctgcaatagtccactacccctcctgcaggagctaagggccaagtcatcttgtccgtgcgatctaaattaacaggtccctgccatcccagacccccaggattcccttcaaagccataactcgggccagtggttttcacctgacagctcgacccctctgagcaccacaggaggtcctggccccgaccctggagagggtggccacctaccaagcgcccagtacagcacctggcacagtgcaagccccctgcacaggggaggcgttcttgtgatctgtgcctgcgtcgggcctttcttcctcaagggcggggtaagaccacccgcactgcaccaagagaatgtcggagggtatctccagactccggcgaagcccaactggcggagcctggggggtggagaggagcgcgccccagttatcacgcgcaggcagcggggtcaaacggggattaacccgggatcccgtcctacggcatttaacattatggggctgcccgcgcagggtgtgggggggaacaccttagcgaagctattggcaagtgacgatatcgccaaaggggggaaaagaaataaaagcgaagctagcgtcgtgagaaacgcggcggacgccccaaaagtgctccaggacctttctgcccggctgatgggggatttcgagttgaggtccgggtggaaactaagtttgaaatggaggccgtgtgtggtggctcacacctgtaatcccagcacttggggaggccaaggcggaaggctcgcttgagccccggatttcgaggttgcagtgagccgtgatcgcgcccctgcactccagcgtgggcgacggagcgagaccctatcagaaaaaatggggtttatggcaatacaagaggggacaggcctggtggctctgccggtgaggggaaataaagttaggggagggggccttgctggggacctcggtcagctcccccggacaccaggaagatccgaccacgccaacggaacagagacgggggcggggccgcgtctgaagcacgtggcccgcgtgacgggaggaggccgggccggtcgcgacgaagggcggggtcgctccgtcccaacgtcagaggaatgcggtggggggagggggagagagagggcccctcccctccccgcccccgcggccggcccggacgcccctcgcgccggcgcgcacggccggagcacggcggaacggtctccccggcgccgcacgttccaggccgccggcccggcctggtgacccgcaccccccgcgctcccggccaccgccccgcccccaccccgctgctcggaccctggcccccggccgcgcgcggcgccgcccgccagtgccccggtcaccttcccgcacccctcgcccccagcccctaccagctcggcggcgagcctgaccggccgtcccggatcgaaaagagcagacactgggaagttttgggagagggaggggcgggccttaaagggaccacgaccttttttcagccccgtggggggaagaaaaattgggggcagggggcgcgggagcggggacacggcaggagaccgagggtcgccccgcgggggaatggaggaaaccaggcgagaaaggagcgggaagaccttggagccgcggtgttcgggctccgcgtcccttttccccaaaaatccacccccgccccccgcagacggaaagtcacgcagttgtttgagactcgcgcatctttcctcctggtcaggcaagtgtcttggctgaggcaagtgtttggggtgtacattgctcacataaggaaatgggctggagggacgcaagtgactaacccaggatgccacagcttgcaagtggcatggcggggctggtctgacgccggagcagacgcatcaccactgcacttgcagggcttattagggtgatggggtaggctgtagagatggggggttcagagcaggggactggagccaccctaccggggttccaacgtggaagctgcatttactgtctctggccttaggaaagtaacttagccttcctcatccgttagggggatggcagtaggagcttcgtctgggtcgtcatgaggaatgcagagaatggaaacgggaccttagaggactacccccatttcacagttgaagtaaaactggcccagagagtggaagaaccgcgaaaaattaccacagctgggcagcctctgaaagagcaggtcgctcccgttcttaatccacacaaaacttaatcggacccttgcagatccttgtaaacccatgccagccgggcacggtggcttcccctgtaatcccagcactttgggaggccgaggtgggcagattgtttaagtccaggagctcgtgaccagcctgggcaacatggtgaaaccttctctctacataaaatacaaaaaaattagctgggcgtggtggcgtgcaactgtagtcccagctactggggaggctgaggcggaaggatcacttgagcccaagaggtggaggctgacaaagcgagaccctgtctcaaaaacaaacaacaccccagaaaaatatggctgggcgccgtggctcacgcctgtaatcgtagcactttgggaggccgaggcaggagaatcgcttgaggtcaggggttcgagaccagcctggctaacatggcgaaacccggtctctacttaaaatacaaaaattaggctggcgtggtggcaggcgcctgtaatcccagctactcagaatgctaaggcaggagaattgcttgaacccgggaggtgaagtttgcagtgagccgagattgtgccactgcactctaacctgggcaacagagtgagactctgtctcaaaaaactaaaataaataaaataggccgggcacggtggctcacacctgtaatactagcactttgggaggctgaggcggctggatcacgaggtcaggagatcaagaccatcctggctaacacggtgaaaccccgtctctgctaaaaataaaaaaaaaattaaaaaaaaaattagctgggcatggtggcaggcgcctgtagtcccagctactggggaggctgaggcaggagaatgacgtgaacccaggaggcggagcttgcagtgagccgagatcgctccactgtactccagcctgggcgacagagcgagactccgtctcaaaaataaataaataaaagtaaaaaataaataaataaataaaataaagaaaaaatagtaatgctgctgtgaccattcctagtgatatcttcttgtgtccatgtgtgagagttttaagggcatgtaggtaggagtgggattgctgggtcgtgtaacatattttgacattattgggtagtaacaaattgttattcaatatatctgtaccatatattcccaccagcagtatatgagaaggtctcattcttttttttttttcttttgagacaagagtttcaatttgtcccccaagctggagtgcagtgatgcatacacagctcactgcagcctcgacctcctaggctcaagtgatcctcccacttcagcctcctgagtagctgagaccgcaagcacatgccatcataccctaatttttttttttttttttttgagatggagtctcactttgttgcccaggctggagtgcaggggtgtgatctccactcactgcaacctctgcctcccaggttcaagcgattcctctgcctcaacctcctgagtagctggaattacaggcacacgccgccatgccaggctaatttttgtatttttagtagagacggggtttcaccatgttgtccaggctggtcttaactcctggcctcaagtgatctgcccacctcggcctcctaaagtgctactagcattacaggcatgagccacagcgcccagccaccctaatttttttaaatttttttaatttttttatttttatttatttttttttttgtagaggcaggggtctcactatgttgcccagggtgatcttgaactcctgggctcaagcaatcctcccacctcagcctcccaaagtgttaggattgtaggtgtgagccatggcaccaagcctaggtttctttttttttttttttaatttaatttaattttattttattttatttattttttttttattgatcattcttgggtgtttctcacagaggggcttttggcagggtcataggacaatagtggagggaaggtcagcagataaacaagtgaacaaaggtctctggttttcctaggcagaggaccctgcggccttctgcaccgtttgtgtccctgggtacttgagattagggagtggtgatgactcttaaggagcatgctgccttcaagcatctgtttaacaaagcacatcttgcaccgcccttaatccatttaactctgagtggacacagcacatgtttcagagcacagggttgggggtaaggtcacagatcaacaggatcccaaggcagaagaatttttcttagtacagaacaaaatgaaaagtctcccatgtctacctccctctacacagacacggcaaccatcccattcctcaatcttttccccacctttcccccccctccattccacaaagccgccattgtcatcctggcccgctctcaatgagctgttgggtacacctcccagacggggtggtggccgggcagaggggctcctcacctcccagatggggcggccgggcagaggcgcccctcacctcccggacggggcggctggccgggcggggggctgacccccccacctccctcccggaccgggcggctggccagacggggggctgacccccccacctccctcccggacggggcggctggccgggcggggcctgacccccccacctccctcccggacggggcggctggccgggcagaggggctcctcacttcccagtaggggcggccgggcagaggcgcccctcacctcccggacggggcggctggccgggcggggggctgaccccccacctccctcccggacggggtggctgccgggcggagatgctcctcacttcccagacggggcggctgccgggtggagaggctcctcacttctcatacggggcggctgccgggcggagggtctcctcacttctgagacggggcggccgggcagagacgctcctcacctcccagacggggtggcggccgggcagaggcgctcctcacatcccagacggggcggcggggcagaggcactccccacatcccagacgatgggcggccgggcagagacgctcctcacttcctagatgtgatggcggccgggaagaggcgctcctcacttccgagatgggatggcggctgggcagagacgctcctcactttccagactgggcagccaggcagagggactcctcacgtcccagacgatgggcggccaggcagagacgctcctcacttcccagacggggtggcggcctggcagaggctgcaatctcggcactttgggaggccaaggcaggcggctgggaggtggaggttgtagcgagccgagatcacgccactgcgctccagcctgggcgccattgagcactgagagaaccagactccgtctgcaatcccggcacctcgggagtccgaggctggcggaccactcgcggttaggagctggagaccagcctggccatcacagcgaaaccccgtctccaccaaaaaaatacgaaaaccagtcaggcgtggcggcgcgcacctgcaattgcaggcactccgcaggctgaggcaggagaatcaggcagggaggttgcagtgagccgagatggcagcagtatagtccagcttcggctcggcatgagagggagaccgtggaaagagagggagagggaaaccatggggagagggagagggacagggacagggagagggagagggagagcgcctaggtttcttctgctgttcttttccaaaacttcttaaattttgatacgtctttctccttttctaatataagcacggaggctctgaatttccctctccattttaatttggctgcattttacagaaaggtgttttggaacttccattctaatttctctcagacagatggcatttttaacttattttgttgttgtggtttgctaaaatacttgcaagttggtacattttgcattttgaaagattttgccaaattaccctccattagcactgtaacaatttgagttctcagcatttctatgtaaaaaatgaattttccccactatctcaaaatactgcacattttgttttacatttgtcaatctgaggtaaaaactggttttaattttaatttactttatatttaccttattgaatgaatcgtgtgtgtgtatgtgagcgtataccatatgtgttcacatgggaattggaacagctagagaaaaaacatcccagggagaagaaacagcaaatgcaaaagccctgaagtcggctgggcatggtggctcacgcctgtaatcccagcactgggaggccgaggtgggcagatcacgaggttcaagaccagcctggccaacacggtgaaaccccatttctactaaaaatacaaaaattagttgggcgtcgtggtggttgcctgtaatcccagctactcaggaggctgaggcaggaaaatcacttgaaaccggaaggctgaggttacagtgagctgagatcacacgccactgcactctagcctgggcaacgagcgaaattccgccacacacacacacacacacacacacacacacacacacacacaaaaagccctgacatgagaactgaagacctttgtggctgggcagagggagtgacagggtgagtctgaggggacaaggtcagaggggtgatgggggcacgttatgtggggcccactgagacgggctgaggatgaggactttggtcttattactaagtgagaaaagaaccatgagagggttaaaaaccagaatgacaagctgagcatggtggctcaagcctgtaatcccagcactctgggaatgttaaggcaggaggatcccttgaggccaggagttttagatgagcctggctaacatagtgagacaccatctctacaaaaaaaaagtaaaaggccaggtgcggtggctcatacctgtaatcccagcactttgtgaggtcaaggcgagtggatcacctgaggtcaggagtttgagaccatcctggccaacatggtgaaaccccatttctactaaaaatacaaaaattagctgggcatggtggtgggtgcctataatcccagctacttgggaggctgaggcggaagaatcaacttgaacctaggaggcagaagttgcagtgagtcaagactgtgctattgcactccagcctgggcaacaaaagtgaaactccatctcaaaaaaaaaaaaaaaggaaaaaaattagctgggcatggtgtaatgcccctagtcccaggtcctcaggagactcaggcaggaggatcacttgagcccaggagtttgaggctgcagtgagctatgattgcaccactgcactttagcctgggcaacagagtgataacttctttccaaaaaactccacaaaaaacagaagagtgatgagatcagattttttttggattaaaaaatataacatctttattaagctatatttcacataccataatattaactctttatatatttatttatttatttgagacgcagtctcgctttgtcgcccaggctggagtgcagtgatgcgatctcatctcactgcaacctctgcctcctgggttcaaacgattctcctgcctcagcctcccaagtagctgggattataggcacctgccacaatgcccggctaatttttgtatttttagtagagatggggtttctgcatgttggccaggctgacctcgaactcctgacctcaggtgatccgcccgcctcagcctcccaaagtgctgggattacaggcgtgagccattgcacccagccaaatattaactcttttaaagtgtatgactggctgggctggtggctcacacctataatcccagctatgtgggaggccgaggtgggcaaatcactgaggtcaggagtttgagaccagcctggtcaacatggcgaaaccacctctctactaaaaatacaaaaattagccaggcgtggtggtgcacgcctgtagtcccagccactctggaggctgaagcaccagagtcacttgaacctgggaggaagaagttttgtgtgtgtgtgtgtatgtttgtgtatatgtatgattgagtgttgagtggtttttagtatgctcacatagtcatgcaaccatcatcactgtctgattctggaatattaccctcaaaaggaactccataccctttttttgtttttcgagacagagtcttgctctgtcgcccaggctggagtgtaatggcgtgatctcgccgcactgcaacctccgcctcctggttcaagcaattctcctgcctcagcctctggactagctgggattacaggcgcccaccaccataccccgctagtgttttgaatttttagtagagacggggttttgccacgttgcaatccgcccacctcagcctcccaaagtgctaggattacaggcgtgagccactgtgcccagcctccatatccttcagcagtcactcccctcagcccccggcagccgccaatttactttctgtctctatggatttgtctagtctggacatttcatattgtagggtccagccctacggggcttagcaggtgttctccccgtgtgcagagatgagagatggtaataaataaagacacaagacaaagagataaagagaaaacagctgggcccgggagaccactaccatcaagttgtggagactggtagtggccccgaacggctgggcgcgctgatatttattgcatacgagacaaggggggcagggtaaggagggtgaatcctctaagtgattgataaggtgaagcaagtcacgtgatcataggacgggggtggggggcccttcccttttaggtagccaaagcagagagagaaggcagcatacgtcagcgttttcttctatgcacttataagaacgatcaaagactttaagactttcactatttcttctaccgctatctactaccaacttcaaagaggatccaggagtacgggaggaacgtgaaagtggacaaggagcgtgacctttggagcacagcaccacagggaggggtttaggcctccggtgactgcaggcaggcctggataatatccagccttccagaagaagctggtggagcagtgttccctgactcctccaaggaaaggagactccctttcgcggtctgctaagtaatgggcgtcttcccagacactggcattaccgcttgaccaaggagccctcaagcggcccttatgtgggcgtgacagagggctcacctcttgccttctaggtcacttctcacaatgtcccttcagcacctgaccctatacccaccggttatccttagggtatattagtaatgcaacaaagagtaatattaaaagctaatgattaataatgtttataataatgattgataattgtccatgatcatctctatatctaatttgtattatgactattcttattctaactattttctttattatactgaaacagtttgtgccttcagtctcttgcctcggcacctaggtaatctttcacccacatcatataaatggaaaaatatagtatgtagccttttgtgtctgattctcttagcatgttttcaagtttcacccatgttttttaaattaaattaaatttttatttttgggggacggagtttagctcttgtcgcccaggctggagtgcaatggtgcaatctcggctcactgcaacctctacctccaaggttcaagcgattctcctacctcagcctcccaagtagctgggactacaggcgcccgccgccatgcccggctaatttttgtaattttagtagagactgggttttgccttgttggccaggctggtctcttatctcctgaccttacgatccgcctgcctcggcctcccaaagtgctgggattacaggcatgagccactgtgcccgacctgctttcttcttttttgttgttaagcctcctccggctccaagcagaaatagcttcacggtctgctgtgcttcagattgaaaactcagacaccctcagggaccagtggggaaagccaccccttagaggaaagtttctcatttgcattacgcagtcctgaccctttccctacctttccccgcccccagcttcaatcaggtctaactgatatgtgagaaaccagacctttaaagtgtacaattgatgagttttaacttacatatacacctgggaaaccatcaccacaaatcaagatagtgaccacaaggtaaaaacagtattcatcatccccaggaagtgtttttgtttttttgttttttgttttttatttttttttttgagatagtcttgctctgctatccaggctgaagtccagtggtgtgattatagctcactgtggcttactcccaagtagctgggactacaggttcctgccaccccatggccattttatatatatatatatataatatatatgtatataaaatatatatatagttatatatatacacactatatatactatatattatatataatagttatatataccatatattatatatactatattatatatagtatatcatatatagcatatattatatatactatattatatagtatctcatatatagcatataatatatactatattatatatagcatatcatatatagtatatataatatatactatattatatatagtgtataatatatactatattatatatatattatatatataaatataattgggtttttttttgtttgtttttttggtagagatggggtcttgctacgttacctcggctgatctcaaactccgggcctcaggcaatcctcctgcctcagcctcccaaaatgctgggattacagtagtgagctaccacacccacagaagttttcttttcgtttttgagacggaattttgctctgtcgcccaggctggagtgcagtggcatgatctcagctcactgcagcctccacctcctgggttcaagcaattctcctgcctcggcctccctagtagctgggattacagacatgcaccaccatgcccagctaatttttttttttttttttttttgagatggagttttgctcttgttgcccaggctggagtgcaatggtgtgatctcggctcactgcaacctccatctcccaggttcaagcgattctcctgtctcagcctcctgagtagctgggattacaggcatgtgccaccatgcttggctaaatttttttgtatttttagtagagacggggtttctccatgttgattaggctggtcttgaactcctgacttcaggtgatctgcctgccttggtctcccaaagtgctgggattgcaggcatgagccaccacacccagccgctaatttttatatttttagtagagacagggtttcaacatgttgcccaggctggtcttgaattcctgacctcaagtgatccccctgccttggcctcccaaagtgctgggatgggtgtgaaccaccacgcctgcagaagttttcttgagcctccttgtaaaccctctgtttttcactgtcccccgcccagtgttacagaccacaagttcttgggatctgaatgcaactgaaattgacttgaggccaaaacagttttcccagacaagacttcattggagtttatgcctgggtatgagggagacagcacaagagaaagagagcaaatttgctggctgactcttggaaaagagccagtagggcttttttattaggcaaagctctggaattgacattagcgggaggatatacaggctgagctgggcaaaacatgtgaggagtagagcactcatgaggacacttgtctggctgcgatggttatcttgagtaatgggccacatggtgttctggcaggtgcaacaaggctgtaaatcaattgttcagctttccttccggagctgggacactcacaccctcggttacttcctaaggccagttcctgaaattctttttttttcttttgtttgagacagagtcttggtctgttgtgcccaggctggagtgcggtggtgctatcttggctcactgcaacctccttctcccaggttcaagtgatcctcctgactcaacctcccgagtagctgggattacaggcgcctgctaccacgcccagctaatttttatatttttagtagagatggggtttcaccatgttggccacgctagtctcgaactcctgacctcaagtgagccacccgcctcggcctcccaaagtgctgggattacaggcgtgagctaccgcgcccggtctcgctattgattctttttgcttccacggacaactttttatttcctatcttccatctgtgagggcgttcaggacttttgggcctttgtgagtaaacagtcaactctgtggagcggagaccctagagaatatggccagagagaaatgtgagctgtactccattggcagctagcaaaactttcctttctttgagctgtctttgcagtggttctagatcttgggaggacggctgtagatgccctgcatccttggttaagtcataaccttggttaaggcttataggtttcacttgggagagtacctgtggtgaagaagttcacaagccaggaataccagctgtttgtcccaactaaaagctggtaatacggctgggcactgtggctctcacgcctgtaatcccagcactttgggaggccaaggcgggtggatcacctgaggtctggagttcgagaccagcctgaccaatatggtgaaactctatgtctactaaaaatacaaaaattagccggacatggtggtgtctgcctgtagtcccagctacttgggaggctgagacaaaagaattgtttgaacccaggaggcggaggttgcagtgagctgagattgcaccactgcactccagcctgggcaacagacagacactccatctcaaaaataaaataaataaataaataaatttatttattttaataagaaatttaatctggtaataagaaatttaagagtagttattttaaagagctttatagttagaagtcagcttaatcaaaagctaatatccaagtttttttttttttttttttttttttttttaagactgagtcttgcttgtcacccaggctggagcgcagtaacacgatctcggctcactgcaacctctgcctcctgggttcaatgaagccattctcctgcctcagcctccccagtagctgggattacaagggtgcaccaccacgcccagctaatttttgtatttttagtggagacggggtttcaccatgttggccaggctggtttcgaactcctgacctcgcgatctgcccgcctcggcctcccaaagtgctaggattacaggcgtgagccaccatgcccggccccaagttttatatatatatatatatatatttaaaagggctttctgacttttctctttgaatcttttttcgtggactagaactttttttttcaaaaacaaaaaaaccctgtgtgcttggtatgaccacttcctttgttcacttcctccctttttctttttttcttctttcttgaggtggggtcttgctctgttgcccaggctggagtgcagtggtgtgatcacagctctgcagctttgacctcctgggctcaagcaatcattccaccttcacctcccaaagtgctgggattacagacatgagcttctatgcccggcccacttcctttattaaaaattatttttccatgatgtgagtgagagcccaaggggagacttctagcatgaagcccagagctccacagcaaacaggagcttgagtttgaccctaagccctcaaccagcgataccccaaacagctgccatttgagtttcacgtcccttttttttttttttttgccacacattcatgcatcacctgcccacttcactgcttaataattttctttaaatcaacccactcttttgtttttaattcaacacatttatttaaacaggagatgtcatttcactccaggaagtggaaaaccagtgtcagttggcacacatagactctaatagtacaaataaatccaatgattcagcaacaacagagaagtgctaaaagcattgggtgaaaggtgttgaggaacaggttggtcaccaggtctcaaggtgacacccacagatgatgcaagaattcaaaggctcacgcctataatcccagcactttgggaggccgaggcgggtggatcacttgaggtcaggagttcaaaaccagcctgggcaacatgacgaaaccccatttctacaaaacataccgaaaattagccgggcatggtggtggtgtgcacctgtagtcctagtactactaagctgaggtgggaggatcgtgggaggtggagattgcagtaagcctagatcacaccactgcactccagcctgggcgacagagtgagaccctgtctcaaaaacaaaccgacaaacaacaaaaaataaaacaaaaaacaaggggagaagatgaccatctgcaagccaaggagagagccctcagaaggaagtctattgtgctgacacctcgaactggaactattgtaaccgcccaaggggttcacgtttcctgctgcctagacagagcccatacatcaaaacaggggaattgcaatagagaaagagtaattcgctgggcgcagtggctgacgcctgtaatcccaccactttgggaggctgaggtgggcggatcacgaggtcaggaaaccgagaccattctggctaacacggtgaaaccctgtctctactaaaaacacaaaaaattagccgggcgtggcggcacgtgcctgcagtcccagctacttgggaagctgaggcaggagaatggcgtgaacccgggaggcggagcttccagtgatgcaatgagctgagaccacgccactgcactccagcctgggcaacacagcaagactccgccttaaaaaaaaaaaaaaaaaagagtgattcacgcagaggagccagagcccgctgtgcgctgtgcgggagaccggagttgtattattactcaaatcagtctccctgagcattctaggatcagagcttttaacaacaacgcggtgggtggggggaagctagtgagccaggagtgttgattgctcaggaatgaaatcatagggagtcgaagctgtcttcttgagctgagtcagttcctgtatagggggccacaagatcagaagagccagtttattgatctggtggtgcccactgatccatcaagcgcagggtctgcacaatgttccaagcactgatcttaggagcagtttagggagggtcagaatcttgtagcctctggctgcatgactcctaaaccataatttctaatcttatgattaatgttagtcctacaaaggcaatctagttcccagacaagaaggaggtctgctgttgggcgcggcggctcacgcctgtaatcccagcgctttgggaggccgaggtgggctgatcacaaagtcaagagatcgagaccatcctggccaacatggtgaaactgtgtctctactaaaaatacaaacattagccaggcgtggtggcacatacctgtagtcccagcaactcaggaggctgaggcaggagaattgcttgaacccgggaggcggaggttgcagtgagctgagattgtgccactgcactccagcttgggcaacagagccagactctgtctcaccaaaaaaaaaaaaagaaaaaaagagggagttctgctttggaaagggctgttttcaactttgtttaaactataaactctttctctcaaagttagttcggcctacatctaggaatgaacaaggacagcttggagattagaagcaagatggagtcaattatgttagatctctttcactgtctcagtcataattttgcaaacacagtttcactgggaggaaataaatttctgttgtttaagccacacagtctgtgatcttttttttttcttttttgagacagagtctcgctctgtcgcccagactggagtgcagtggcacaatctcagctcactgcaacctccgcctcccaggttcaagcgattctcctgccccagcctcctgagtagctgggattatgggcgcgcatcaccatgcctcagcctcccgagtagctgggattacaggcgcgtcaccatgcccggctaatttttttttttgtatttttagtagagacggggtttcaccatgttggccaggctggtctcgaactcctgacctcgtgacccacctgcctcagcctcccaaagtgttgggattacaagcgtgagccaccgcacccggccatctgtggtctttttgatggcagctctagccgactagcctatctccttagctcaatggtcaaagttagctttaccaatcacggcccctgatgggattcaggtaccgagaaggacacagcgtccctgcggagtattcttccccacagctgcaagaccagattttaatcatgaggaagcagcagacgaggccagaaactgggactgtccacaggacaactggccagggctcttcgaacagccagggtcagtccagctgctacacatgtgaggtaagaaaaaaaaaagccaacgtcaggagcctctctgaacctattgtggtttggaggctgtccagtttatttacaaattgaaaaaaagttatatatatataaattattatattattgttttataatatttatattattttataaattaatataattattatgattataaattaaatattttaatttatatataaattattttttatttttgtaaatatataaatctatctatatatagatatatctatacgtatagacacagatagatacctcatgtagctagtgcatacttgaaatgtgactagtccaaactgtgatgtgattaagtgtaaaatgcacagtaaatttcaaagctttagcatacacacacacaaacatacaaagttttaaatatgtcagtaactttttaatatggatacatgttgaagtgataatatttgggatacattgtgttaaatcaaatatattattattaacgttaacttcacttgtttctttttatttatttatttatttttgagatggtgtttcactcttgttgcccaggctggagtgcaatggcgcaatctccgctcaccgcaatcttcgcctcccgggttcaagccattctcctgccttagcctccggagtagctgggattacaggcatgcgccaccatgcccggctaagtttgtatttttagtagagacgggtttctccatgtttgtcaggctggtcttgaactcccgacctcaggtgatctgcccaccttggcctcccaaagtgctgggattacaggcatgagcaaccgcacccggcctcacttgtttctttttagttttttaaattgtagttactatgaacaatgaaatacataaatatatggtttgttagcatgtgatacattctttgggaaaaacgatcacaattgggcacggtggctcacgcctataatctcagcactttgggaggccgacgtgggcagattgcttgaggttaggagtttgagaccagcctgggcaacaaagagagacctcatctttataaaaaattttaaaaattagacaggcacggtggtaggtgcctgtagtctcagctacttggtaggcagaggcagggggcttgtttgagccaggaggttaaggctgcagtgagccgagatcatgccactacactccagcctgggcaacagacagagacgttctttcaaaacaaaacaaaaccccctgttcctcaagcaagatgccagacgtacctgggtcagtccagactcctgacctatgtggtttaggagcagcaaggaggagggaggggtcccaggaaaagggaacagcctacctctgggcctttgcactggctcatcctgcttctcggaatgctcttcctaatacccactctgctcctcccttcccctcccctccttcaggcctttctgcagatgtcacctcagtgaggctttctctgatacgcctgtctaaaactgcaaagcctcctgagtagctggtaccacaggagtacgccaccacgcccggctaatttttgtttttttttttttttggtagatgggggtcccactgttttgcccaggctggtctcaaactcctgggctcaagcaatcctcccaccttggcctcccaaaatgttgggattacaggcatgaacggaggggtgtgaaacccctagttgtcactggtccctgtcacagtctcttctgcccatggctccttaaagggcaggttggcctgtggggagaggtgggagctgggtcagaagggcaccaggtctcaccctcccttctacttgcagccagatgggcagtcacctgggctctgggatgatcctttctgtgcagcgtccgcctgcggtgccactggtgcagggaggcgcgggcctcggagctgagcccccggggagcgcggtctgtttcgggctggtagtgggcaatgtggtgcagcgccccaaaccacgtggtcaggtagtacccagctggggacagaaagggaagtcagctccgccctctcggcttccctggtcgccccaaatccccctgcagtttgcctgccgtccctcctgctgcggggggaggctgtttgggatcccggaggtactggatcgctgggctccagcattctggagttgggggctcaccctctccccgcagctcatctggatctaagagctccataagaaactctacgtccagctgcgtgtccccaatgtccgggctccagatgagttcctcggtcagcgccggcaggaaggcgtcggcccccaggggatctgggaaaaccagaggaaaggtcttgagatggatccccatctcaaggcgcgtagacaccttccatccgatccccaggaccacgagggctggctgcccctccaccttgtcgggcatgacagcgcctcctaccagaatcttcaggaccgcatagattcctcccaccagtgctaccctctcccgcctggctccaactctcaaggctctccccaccacgctagacgttgacccctcccttaccttggttctcgcctcgagccaggcccgcatagacatctctgcacacctccaagaggagcgccaccttgcggcgcggggcgcaggcagcgtggaggtgcgcaaggcgctcgtggatgcggctccgcaaggcgggggcggggctctgcccttccggtcccggcccctgtgcccccggaggccccgcccccgcccgcagggctgtctgtcgccgccgcagccgccgcagctccggtgctcggagtgtgcggagtcgtgtccacagggccggcttcaggggcgccagcaccgcctggcacaccgccgtctccagcgcggggcctgcggggtgtgggggacgggtgagcacaggaccgccaagttgtcccacgcccacccacgcgctccaacaacccaccctggcccacagccacccctgcctagctctggtcccccgtgagtgtagacatggttgtgaacatgtgtggaagagttagcctgggtgtgaacttgcgcgcatacgtgggcgatagaacgcgtgggatgtgtaggaagggcgtgtgggtgcagaaggaaacgtgtgcgcaccgatggagaggacgaagttgcacacttgaacccgtgggggctcccttccagtcctcccattacctggatcctcgtccttcttggggagcccaggacccctgcttccaaagacagccctgatgtaggagtcctttgccaggtgatcctggaggtcagtaaggaggtgccgcacatcctgaagcagctccgtggccgggtccccagacccgtggggacccccagaatctgaggcgatgcgcacccgaaggcttcggtactgcctggccacgtagctgctccgggccctgaccagagactggacgtgaatggtgagcacgtcctcagggccttcctcttcagggtcgtcctcccttccttcctcctttccttcaaggtcttcctcctcctcttccagtaggctggcgagagccggcccaggatggtccacttccgggctgagcgggcctttcacccaggagaccccgtgaggcgcagggttcctgggggctggaagtgaggagggcattcggtcgcctagaacaggggcagcagctccctccccttcagaggcccagggccccgcccagctaacctggatcatgtctctgagcagcctctggctctgtttcttgaggggtctgctccctcccccagcctctgtgggtctccaggtagagctggttcacaatggaaagcaccttccctggggtgtcctgttggaccctgccgatctgcacaggatctggagccagcagaagtgagaaggtgtcctaggtatccaagggaccaaccctggtcccctcaaggcgccaggagacttacttcccagcttcattgctggaggtgctgaggcttagctcctggcccctcctcagtcagacccaggagtccaggcccctagtccccttctcacttaggcccaggcgtccgggacccccagttccttcctcctccaatcctctcctctgttaggacctaggaatacaggcccccatcccctcctccctctgggactacaaagtccaggcccccagctctctctagtctccagttctatattctcctcaaacccagtagtctgggccccaaagccccattcattcccttggagcaaggaaattggcaggttggctgtgccctctttagagaaccgtgcctcacctgtgtgttcatctctgggccctagagtgggagggggcaagagcagggttctgggcagaacatccctgagaataaagaggtgggagccacagtgtcagtggggtgtcttagggaagggtcccccttagtgcctcagatgggtgacctgtacctgctggctgatagaaaggccaggagatggggcaggtctggcatgcagaggttggaggattccagggacacacctgtggtggggggaggaagaaggagaaagtaaacttgagtggtggcagttttctgtcccctgggatgctcttgctcctccattccttcagaatccccccagggaccttcagaacagggaagttcccactctttggagtctccatctttactcttgtgtaccacttatgccaccaacaaggattcattcattagacaaacatttactgagcccttagtcctttctaggcactggagatacagttatcaaaaggcagacaagttcactgccttcctgtagcttaccttttagcggggggcggagggggaaaaggcagaatataaatgaataaacagtcagggtacggtggctcacgcctgtaattctagcactttgggaagccgaggtgggtgaatcacctgaagtcaggagttcgagaccagcctggccaacatggcgaaaccccatctctattaaaaatacaaaaattagctgggcatggtggtgggcgcctgtaatcccagatacttgggagcctgaggcaggagaatcacttgaactcgggaagtggaggttgaagtgacctgagattaagccattgcactccagcctgggcgacaaaagtgagactatctcaataaataaataaataaataaataaaaataaattttaaaaacgagtaaacaaagtggatattgtattgagtgctatgaagaaaatggagtgattgaaagtgaccaagaggccaggcatggtgacttacgcctgtaatcccatcactttgggaggctgaggtgggtggatcacttgaggtcaggagttcaagccagcctggccaacatggcaaaacccatctctattaaaaatacaaaaaattgggaggtgggggcctaggggagggatagcattaggaagaaatacctaatgtagatcatgggttgatgggtgcagcaaaccaccatgacacctgtatacctatgtaacaaacctgcacattctggacatgtatcccaaaacttaaagtacgataaaaaataaataaataaaaataaaaataaaccaaaaaattagtcatgtgtggtggtgtgcacctgtaatcccagctacttgggaggctgagaggcatgagaattgcttgaacctgggaggtagaggtggcagtgagttgagattgggccactgcactccgcctgagcgacagagtgagactctgtctaaaagaaaaaagaaaaagaaagtgaccaaggtgccatcttttaactatgatggtcaagaaaggttacatttctgcagaggcctggaggatggagactaaaccagcccctctaggaaaagcattcatacaggatgaacccaagcagaggtcctgaagctggaacacacttagcatgctaaagacacacagagtgtaacagtgtgtatggggcagagtgaatgaggggcaatagatagagagacaggaaggaactacatcacacagcaccttatagatcatgacaaggagtttacattttgtatctaaggacgttgcatgctctttgcaggatttggggcaggggtgtataacatctgattgatactgaaaaatatcttgggctcagaatggattgtgggaaggaaagggagacaggattggaaatattcatcagatattttggaaacaaagctgacaggtgtttttgttttgttttgttttggcagggtttccctctgttgccaaggctggagggcagtggtgtgatcttggctcactgcaacctctgcctcctgggttcaagctattctcgtgcctcggcctgccaagtagctgggattacagtcgcgcgtcaccaagcccggctaatttttgtattttttgtagagacggggttttgccatgttggccaggctggtctcaaaatcctggcctcaagcgatccacccgcctcgacctaccaaagtgctgggattacaggcgtgagccaccgcgccggtccagctgatagttcttagtgatcaattgactgtgggctggaacctcaggggaggtgccttacctctgggaatcttctggatctggtaggtattgacttctcctggtaaaggtcctgacctcaacaccagggcctggctggggtcacgtcctgtgaccaagaaactctgggggatagagacaaaggccagcgtgacaaaggtgtgcgcagatgtctgttgcttttgcctgactagcatccatttcccttattttgggttccacaccccaaatttcctttagggaaaccctctccctactttcagtccatgtgtgttgggctgacttcccccaagccctggcggggtgggcccatgacctgatctagccaacaggatgagggtgctctcggcccactgtttggttcagggaacaggcatgtgactcaagctcagccaatggacatcttccacaggatttttttttttttgagacggagtcttgccctgtcgcccaggctggagtgcagtggcacaatctctgcccactgcaacctccgcctcccggggtcaagcgattctcctgcctcagcctcccaagtagctgggattacgggcgactgccaccacgcccggctaagtttttgtatttttagcagagacagagtttcaccacattggccaggctagtcttgaactcctgacttcaagtgatccgctcttctcagcctctcatagtgctgggataataggcgtgagccactgcgtgctggagctcttttggaaagacttcatttgttacactggtgttgctaaactggtgggatacagctctgagctgggaaggatgataccctcctgaggaggaagctgtggtagcccccgtttgctgtcgtctccaaacctattccacattccttgcagaattccttgttcacggcattaatatacccagccatgagtatgattgatatatggatcatgattgatataggtggtggttcttagctctggctgtatacgtcccaagagagctgttaaaaatattgctacagccgggcacggtggctcacgcctgtaatcccagcactttgggaggccgaggcgggtggatcacctgagggcaggagttcgagaccaccctggccaacgtggtgaatcccagtctctactaaaaatacaaaaattagccgggtgtaatggcgggcgcctgtaatcccagctactcgggaggctgaggcaggagaatcgcttgaacccgggaggcagaggttgcagtgagccaatatcgtgccactgcactccagcttgggtgacagagggagactccatctcaaaaaataataataaaaataataaataaaaaaattaaaaatattgctacctgggccccatccttttttttttcttttttcttttttttttttttttaatagagactgggccttgctctgttgcccaggctggtcttgaactcctaggcttaagcgagcctcctacctcagcctcccaaaatgctgggattacaggcgtgagtcagcacacccggccagccatctatattttctgaatcagttgtgaaaacctttattttggccggggacggtggttcacacctgtaatcccagcactttgggaggcagaggtgggtggatcacctgacgtcaggagtttgagaccagcttggccaacatggtgaaatcccatctctactaaaaatacaaaaaattagccgggcgttgtggcagatgcctgtaatcccagctactcaggaggctgaggcaggagaatcgcttgaacctgggaggcggaagttgcagtgtgccgagatcatgccattgcactccagcctgggcaacaagagtgaaactctcaaaattaaaaaaaaaaagaaaagaaaacctttatttttcctgtaaaataaacagatgcaagtggtgcctctgttcttcctgcctggaatgcacgcaggtgcttgggcctggggcagcccccgggaagctgtgagagaagtccaagagaattatagctatgctggcctcaatgtcactgcactgctgatctaaagccagcagctgcctttttggttatgttaggaagataaatgcctatttgtttaaaccgctgtaggacaggtgtttgttatattcagtcccaaatatccaaaattccccgcagttgaaagcaaagccaagaaatgggatgaagaggaatttataagtgttctgaagttcaggatccagagcttcttgaaattacatttttttttttttttttttagacagggtcttgctccatcacccaggctcaagtgaagtggcatgatctcagctcactgccgccttgacctcctgagctcaaatgatcctcccacctcagcctcatgagtagctaggactgcaggcatgagccattgcacccagcaataaatagcctttttggtttgcccaatttgtgtcatgtttgtcactagtaaccagcagagtcctaatctagggtgtcaggatgggcccccagctgtgagtactcacccctagtggccacagccccacaagggcctccgcatcctgggtatccagctctggcacatgccacaccccccatgtcctctgcaggcgagtaagtggctctagggtgctgaggacccctagaggggtcctgtctgctttgttcacctgtggtgggaccagcctgggatggacagtgtccagggagtcaggggtcagaggtgggcagtgggacaatgaggtgaggtcaaaggtacaggaaggggcaggcccagggcagaggctcagagatgtgattcaggattctgtagtgagggaggtattggatggaaagggtttctggatgcaggggaaggagggcatagcctcagccctagtagcctcacctcaccccctctgtggggacttcaggtgccttgtcttctggctgggccatcgtcaggttgcaggaagccagtgagtcatgacctggcctctggcagggagaaaggtaagactcaaagctgctctagccctcgggtcatgttcaagatatttacaatcaatatggcagagaccctgaccaatcagaatggaccccagaggccgcttgccgtggcaggggttaattctttattttatttttgagacggagtctcactgtattgcccagactgcagtgcagtggcacgatctcagctcactgcaacctccgcctcgtaggttcaagcgattcttgtgcctcagtctcccgagtagttgggattacaggcgtgcaccaccacgcctgggtaatttttgtattttttagtagagacaaggttttgacgtgttacccaggctggtctcaaactcctgacctcaagtgatccccccgcctcggcctcccaaagtgctgagattacaggcatgagccaccacacccggccggcaggggttaaatctttagtaccggatggtggggaatctggggatcccaggagagaggccagtgtgtcttgcggtgtggggagaggactcaaaacaatagctctttactgaagtggtaggaaatatgttaagatttttaacagccatgggggctgtgtaaatgtgggccagcccttggcaaaacccagtcagcgcctggaaaagttcttggcccagagtaggcagtccctatatctggaaaggtaataacatcccctcttcctcccttcccacaccatggaggggccactgaatctcttcccccagcattttattatgaaaaatttcagacatagagaaaagctgaaagaattgtacaggaaacatccctatgcccactaccaagattctaccatgaacattttactcatcttgctttatcacacatctgttcctctctctcttcatccacccatcaggccccagctcctaaccaggtacagagtcctacgtaggttatcacttagggtggcacttatcccagcagcagtcccaggagcaggagacctggatcgggggaggatccatcctccctccctccctccctcccttccttccttccttccatccatccagtatttactgaatacaggctggaattaggtgcctctgccctggagagagggtgatgaacaggacaggctcctcccctcagggccttccattcttgtttggggcaggtgtagcatatggataataggcagctaaacaaatacattaggccattgaccagaaggccagggtgttattaggaaggagggaggtgggcagggaggcgcaggtgccctgcccaggcaagagcaggaaggaagggaggggaggggaggggagagggaagcagatgcctgcttgtgtaccgtggcaggagaggaggctgtgggcagtgcgtggcaggggtgggtcagggcagctgcctcataccaaagggaggcagcaggggctgaagatgccagatgctcggttcctgggggccctacctgttctcggaggagaggcctgcagtagcaggaagtggagagaggaagctgagcaggcagggggaagaggcggggctggggtatctgaagtcaactttcctccctctttctggggcctcaggcctttagtgacggggcttagaggaagggacactggcaggctgggagtccaggggtcagagccacgagggcccccgtgaggaccctcttgttacccctcactctggatcccggagactttctggttccttagtggcccaagatctaaccccctcccttcagagatttccctgggtgcccacagaaagaaacaggaggccagaccggattgttagttgtttttgtttttaatttgtctccaataagcaatgtcttctgcccatccagcatgggaagtgggtcccacgtgaagggggcccaccacccactttgggagctgaaggcagagactcgggagccctcccggctcagactccccctacgctgggtgtgggttatattcagaggcccacacccacactggggtaggttaggtatggtttacttagccacaggcccccgggggcaggagacagagtgggggcccgaagctccctgtcctggaagagttaaaagttctggggtagccctggccccgtgggggcagttagagatgagggaggttactccttagcccaggagtggttagagacagtggggctggtagagatgcctgtttaagccttggcctctaggaggtgttagagatttgctggggttgggggccagggttgctgggaccccagttttggggagggagctgtaagagattgggggatgttctgagctccccagacaagaactgctggttaagagggggccaggcccggttggggctcagctgtccctgaggagctcggcatcccgcctgggagatgcagctgtcactggggtttctccctctctgttgtcctggcctcgtccttggcaggtggcggggacttcttgggggaagctgaagtgctggggttggggacccccgcccccgactgggcatctatgctggcgtgctccctccggacaaggtcctccagctccttctgcaggagcaaaggtcacagaagtcaaaggtcactgtgcatcatggggtcagaggacccatggggtggggagagggtccagggatggggctcaggacaggctggggttgctcagctcctcaccttccatccaaggagctcagcaagggccaggcagccctggtcgcattcacccagccaggccacgtccctgcggtgcagcaggagatcagagttcccaggcgggctcgcccctgcctgctcctctcatctgccttcgtgcccccgctcccacctcaccctgtcccttccaggctgccccaacccccggcggggcctcacctgtaggccttcttggagtcaaagtccatgcctcctccgaggcccataatcatccccaggaaagggtccgactgtcagggagggggtgggtcaggggcaggagcagggaagggagagctaagagcacagaccctggagccaggtggcctgggtttgtatcctagctctgtgactttgttttttttttgttgttgtttttttggttttttttgagacaaagtttcactcttgttgcccaggctggagtgcaatgatgtgatctcggctcactgcaacctccacctcctgggttcaagtgattctcccgcctcaacctcccgagtagcctggatgacaggtgcccagcaccatgcccggctaattttgtattattagtagagacggggtttcaccatgttggtcaggctggtctcgaactcctgacctcaggtgatccacccgcctcggcctcccaaagtgctggaattacaggcgtgagccattgcgcccagccagctcagtgactttggtcaagtgacttgtcctctctgtgtcttagtttcctgtagaataggggtgatcacaaaaccgcgatggggttgtggcgccagtgagttcacgcaggctaagacttgggacagtgtctgcccacagcgtgcgctgcttgcccggtgaccctgcctacttcccctgaggggaacacctaggagggagcacctgccctagagtgaggctgcccaggaaaaacagacctgagagacccagagcgtggacccaaccccgccccccgcactgtctctcctgacccctgcaccccctcccacctcctcagtccctggaagcccggccttcctatctggcttcagctggtttgagttggaattctatcacttgctcaaaagggcagtgaatgtcccagaggcctggaacccgacccctctggattctagagccccaggttctgagctgaggaatgcaaagtgctggggttccacagtgggggttccctctgaggaaaagggtgagagggaagggggagcctgtgacgacgggggcttgaagaagggctcttacctggccagctttctccttgttgatgagcaggcgaggggtggagaggggtgccctgtggggagggggagctaaggggtcagggtctgtcctggccctgggtgcccagccgtcctcccagccacagcccccaacctacttgctgatgagggaggcaaagggctgcacctgcaaggaggtacccatgaccaggaggaggtccaccttcaggaagtcctgcggggaggggcgtgagcttgggagcctccgcccaggctgcgccaccgctccctcccccgcccccagcagcaaacctccctgccgccccccatagctggggaggtgacctttcctgaggcagggcccaggctgcccccatggggcccagcacaggtggaggcggcggttggggatgcggggaggctggggggccacttactgactgcatacaggagaagaaacgcgctgggaggctctcaccaaaaaagacgatatctgaggtggagacagatggacggacagagacagtgacatggggaggcagagaggacaggtgggagcaatggcagacccggaggccacagtgggagttgggagcagtggggaccggccaggggcacagaccccattctccccaggatggatctggggcactgttcagagagacagaggtggccagatgtgtgcgggtgtggcctttgggagggggtcagggggaggaggggacccccacccaaatccacctgggcaggtccctggccagaggctcaccaggcttcaccaggctctgacagtcttcacacttgggcgtcacctcagagaagatcttctctgggtatggggaaggggaagaaagagaaggcagtaagaggatctgggccggagtctggaggtgcagcacccccacccctcttccactgttaacatgaacacacctccatcacttggagtgtgatgggtgtctcctgaggtgtccactctgctcagaaaagacctctcttcttgttgttgcattttttttgtttttttctttctttttttttttgagataaggtctcactctgttgcccgggctggaatgcagtggcacgatcatggcttactgtagcctcaacctcccagcttcaagtgatcctcctgcctcagcctcctgagtagctgggattacaggtgcatgccagcacgcccggctaaattttgtattttttgtagagacagggtttcgccatgttgcccaggctggtctcaaactcctgggctcaagcaaatctgcccactttggcttctcaaagagctgcaattacaggtgtgagccactgcgcccggccttattggtttgtttgtttttttgagacaggttctcactctgttgcccaggctggagtgtggtggtgcaatcatggttgagtgcagtggtgtgatcatagcttactgcaccaccgacttcccaggctcaagtgatcctcctgccttagcctcccgagtagctgggctcacaggcatccaccatcgcacctggctacattttattttttttagagatgggatctccctatgttgcccaggctgttctcaaactcctgggctcaagtgatccacccacctcgacgtccaaaagtgttgggattacaggcatgagccactgtgcctggccttatttcttattgatttaggaagcttgaaagcatttctggccgggtgtggtggctcacgcctgtaatcccagcactttgggaggctgaggcgagtggatcgtttgaggtcaggagtttgagaccagcctggccaacgtggtgaaaccccgtctctactaaaaatataaaaattagccaggggttgtagcacgtgcctgtaatcccagctacttgggaggccgaggcagggagaattgcttgaacccgggaggcggaggttgcagtgagccgagattgcaccactgcactccagcctgggtgacagagcaagactccatctcaaaaaaaaaaaaaagaaagaaagaaagcatttctgtcacttgcaacccactgaattctaagtcatttgctcaactgtccattcattcattcagcacacatttataaagcattgtttcaatgtcagtagtcggtaattttctttaaaatatttctgcatggacagcatgacaccgtgggtgctgcctgtgacgctgctgtcaatgacacataatgggggtaatgtgaattgtacactgcccccagctgcttgcagttgggctattcaggaatcctcagcccaggggcactcagctggcattttatcagaacagccacactccagaggcccttctgcaaatgctgcagctgtccttatctcacagggacaccagaggctttgttaaatcagcataaagaatgtcagaaatggctttccatgagtggaataagtgacttcttgttttttttttttttttttttttgagacagagttttgctcttgttgcccaagctggagtgcaatggtgcgaactcagctcactgcagcctccgcctcccaggttcaagcgattctcctgcctcagcctcctgagtagctgggattacaggcgcatgccaccacaccaggctaatttttttttttttgtatttctagtagaaacggggtttcaccatgttagccaggctggtcttgaactcctgacctcaggtgatctgcccgccttggcctcccaaagtgctaggattacaggtgtgagccactgctcctggcctactatcatatattaaaaacagccaaagacaggaaatcaggcagttgggctgcagtgagccatgatcacccactgaactccccgcgtgggcgacagagtgagactctgtctcaaaaacaaacaaacaaaacaaaaaaaccccaaagaattgagcaggacagaatgggtgcccactgcatggagacactgctcctggtgctgagaggaggcctgccctcaggatgccctccagcctcacctttcatccagcttagcgggtattcgtgccggcagctggcgctgacgcagtgtgatgtgtagaaggtgccgtgcgcctccaccaagtcctcctgttccagcccggctattcgctccagggtatctatgttctagagggagagatggagggaagaggggtgaggagtgagccaccccttgtaggccagaaggcacagtagggagttgagggccacgaggagcagtgaggtggtggggacaggtggagaagggagggaggagaagcaagtggcagggtttatctgaagactcttctgttcatcccaatggtgccacttaaagggtgacagtcaaggctgcttaaaggcaggggccaggctgggcatggcggctcacgcctataatcccagcactttgggaggctgaggtgggaggatcacttgaggccaggagttcaagacctgcctgagcaacatatcaagacgcttgtctctacaaaaaattaaaaaaaaaaaaaaaaaaaaaggggcccaaacctaaatatctatgaggccaggcccacagccactccacagcctgtgtggcttttattctgcaaattcaggccatttgctttcatttttcagaaaaaaaatgttgttttattagagccagatgctttatttccacctgtcattaattgctgaaattaacatacatttacaatgtctctgttattaatggagccccctcagatgtggcatccttgtgcagtgcgcaccctgcacagctgcatgtggcagctctaggcaagcattaacataaatgaatcaggagggcttactaggtgtggtttgtttgtttgtttgtttgtttgttttttgagatggagtcttgctctgtcacccaggctggagtgcagtggcacaatctcggctcactgcaacctctgactcccaggttcaagagattttcctgcctcagtctcccaagtagctgggattacaggcacgcaccaccatgactggctaatttttgtatttttagtagagatggggtttcaccatgttggctaggctggtctcgaactctggacctcgtgatttgcttgcctcggcctcccaaagtgctgggattatagacatgagccactgtgcctagccatgtttttttatgtatttgagacaaggtctcactctgtcgcccaggctatagtgcagtggtacaatcatagctcactgcagcctccaactcctgggctcaagcaatcctcccacctcagcctccacatctggctgatttttaaaattttctgtagagatggggtctcactatgttgcccaggctggtcagcgagccttctgcctcagcctcccaatgtgctgggattacagtgtgagtcatcatgcctggcccttccttggctttaatcactatcttcccctttagtagccagggtcctttcttactatggcctgtttcatagatggcatattcacctgtgttcttttctttttttggaggcagggtcttgctctgtcactcaggctggagtgtagtggtctgatcacagctcactgtagccttcacctcctgggctcaagccatcctcccacctcagcccactgagtagctgggactacaggcaaatgccaccatgcccggctaattttttatctttttaattatttttgtagagatggggggtggggtggtctccctatttgcccgggctggtcttgaactcctgggctcaagtgatcctcccacttcagcctcccaaagcgttgggattacaggcgtgagacaccatgcccagccactgttttcttttcttttcttttcttttttttttttttcagatggagtttcactcttgttgcccaggctggagtacaatggcgctatctcggctcactgcaaccactgcctcctgagttcaagcaattctccctgcctccgcctctcaagtagctgagattacaggcacccgccaccatgcgtggctatttttttttttttttttgagacggagtcttgctctgttgccaggctggagtgcagtggcgcaatcttggctcactgcaagctccgcctcccaggttcaagtgattctcctgcctcagccttccaggtagctgggaacacaggcacgcgccaccatgcctagctaatttttgtatttttagtagagacggggtttcaccatgttggtcaggatggtctcgatctcctgacctcgtgatctgcccacctcagcctcccaaagtgctgggattacaggtgtgagccactgcgcccggccactgttttcttttaagacagtgagactttccatattaaacaggtgggaatgttcttttctgcacagacatttgtgcgcgctcatttttcttaaaacaaccaccccctttggagcagctgttgtttgcctgtgaggaatgccgctaaaacaggtgctgacagaggacactggcagaggttacgcagagatggctcgcatgtgtggcccagggccaaactgacagcgtttcccagggactccagaaacaacgggaagggtttgtttcccttcaagggcagaaagaatgctctaactgccttctgggctccctaccagcaaccaccttatctccaaagcctacagacaagagtcactgtcactgttcccacacgccctgtaactttcctcccttgcccactattctaaatcttggttttgcctttggtacttgactcagtctacccactgactccctcacatgtgagtgagcaatttgcaaataactgaacagtaagcaaataactgaacagcgtggaaaagaaccaccgaaatacctctgcgttctgttattctttgacaacatggtttttttttttttttcttttgacaggattttgctctactggtccaggctggagtacagtagcttgatcatagctcactgtagccttgaaatcctgggctcaagcaatcctcctctctcaagctcccaagtagctgggactacaggtgtgcactaccatgcctggctaatttttttttttttttttttgagatggagtcttgctctgttgcccaggttggagtgcaatggcggaatcttggctcactgcaacctctgcctcccaggtttaagtgattctcctgcctcagcatcctgagtagctgggattacaggcacgcaccaccacacccagctaatttttgtatttttagtagagacagggtttcaccatgttggccaggctggtcttaaactcctgacgttgactttggcctcccaaagtgctgggattacagacgtgagccaccgcgcctggcctttatataatagtttgtatgtgatgtgtcattttttttctttttttgagacggagtctctctctgtcacccaggctggagtgcagtggggcaatctcagctcagggcaacctccacctcccaggttcaagcaactctcatgcctcagcctcctgagtaactaggactacaggcatgtgccaccacgcctggctaatttttgtatttttcgtagagatggggtttacaacagcaccccctttcccgaacacatacaccgtttctgactccccttccagcttaactgtgttccagggacccatgaccatcttatatgctcagtatatggtgtctccatcttgtccatcatctccctccctgctgtagggaatcaactcagtgaacatttactttgacagaagctgacaaacaagggccagcggggtcttggggtgagtgtcatgacatcaaccacaaaaagcacttggcttcaagcaagctgttatcatatctgagccacgtcctggaataatggtgactctctgggcagaaggtttattctgagcccggagtctccctatgttgcccaggctggtcttgaactcatgggctcaagcgatctcccactttggcctcccaaagtgtggggatcacaggactcctcctcttggaagaaggaggcctccgctgccctctgcctcctaccagccccaggtgggaacacctcgcccacctgagaaatctgaacttaaagccagttgttcctccccctggcggtagcttttggggctgcaggtgccaaactgcaggtacagggagaaaacactagaacacttatttattttcaatgttaccactcttttttgtttgtttgtttgtttttttaaattgagatggagtcttgctctgtcacccaggctggagtgcagtggcacaatcttgactcactacaacctctgcctcccaggttcaagcgattctcctgcctcagcctcccgagtagctggggttacaggcaccaccacacctggctaatttttgtatttttagtagagaccagatttcatgatgttggacaggctggtcttgaactcctgacctcgtgatctgcccacctcggtgtcccaaagtgctgggattacaggcgtgagccaccgcgcccggccacctgttttataattcggggttctgaggtgtgatctagagcttgaattaatactgttgtagtgcatcatgtcatttctatacatattcataaaacaggtagaggcagcaacattttgttgttgttttgatttgttttttgtttctttgaaaccaggtctcccaggctacagtacagtggcaccatcatagctcactgcagtcttgacttcctgaactcaagcaatccccctacctcagcctcctgagtagctggggctacaggcacacgccaccctgcccagctaatttttgtatttcttgtagagacagggtctccctatgttgcccaggcgggtcccaaacgcctgggctcgagctatctctcgctttggcctcccaaagtgctgggattacaggtgtgagccactgtgcccagcccatcaagatttttttactgttaggggtgtgagactctccaaaccagaagccaacaatgtgagccatccttgcttgaatgccccagggagaggcccttggctaagcacctgacgtgtacgagacatgtttataattgggcaaagcacaaaaaactataaaaaggtgccccttccttaaggcacaacatctacttgttggacacgtgtcatagtgtatggattttgttagatgaagtcactttggaaactcgctcataaccaatgtgaaatctggggtgcctatagtgcacacagagtcccttcagccataggctccttccacatcacacatgggatggccctgagaggaggtcactgccaccgcactgcagacctgagagggcagacctgagagggcaaaccttttctggcccctgtttgacggaaggggaaactgaggcagagaagacgtgactcacggcaggtcatgcagcaaggaggcagtaggccaagccctggccccgcattgctggagtccccgcctgagctcttgggcacgcagctctgctcctctgctgaggacaccatgcccgttccacccgcccatcctcctcccaggatgctcgcatccgcctacctgcgtgtagcagcgcaggagtagccccttgtccttcagcaggcgcatgaagtagtgacagatggttggctgcagggaagagcgacagcactgctgacgactgcagggaacagccacaggccactgccgcatgccaggaactgttctaggcactgtgactgttttacccccagggaaccgtcacagcagccgcgtcggggagagaccactgctatccccagatcacagatgaggaaactgaaggacagggaaggggattgtgttgccaaagtcacacggtgggtaagctgcagagctgagattcacacccaggcagcccggctgcagggtcccgggctctcaacggcatcattagtcagctaagcctcgcagcagccctcttcagacagtaccattagcttcacttcacaggaggcaaatcggaggctcaaggtcgtaagatgaagacacgaggaaccaggacttgaaccgaggcagtctgggcccagcacccatgtacttaatggctacataatatttgtctgcagggccttggcggggcttctcatgcgtgccctcccccaacccttcctgtttcgccccctgcaaaacaaagatctcaccttgaactgcccaggatagagttccttggcgagggcgaagaagggttccggatgtttctgtaggagagacagccagagggccagatgccccaggtagcgtgagggttggagccaggtgaccccatccccacccctcacagacgccccttcctgggggagcacaaaccttgaaatagctgatctcaaagatggcctctgggtagggaagatggtacttctctaggttgtcatagaggccggtggatggagagcgaaagtcggggatgcctgcggctaggaaaggggggtcagggagcagttggtctataccatactaaccctcccaggacagggctcagatagggctcctccccagcccttgggagggactccccagttcctgggggtagctgctgggggagaagggttacttacatgtggagattccagctcccaccaaacagatgactctgcgacctggaggagaggaacttatgcaccatatgacaccgtttgctcagtccctacgatagcaccacccatcacagcccctgacatcgtttactccatgccaggccctggggcaagcatctcagatgcatgacgggccttccaatcatctagacggggatggtgttaacatccccattttataaatgagaaaactggggctcagataggggaagaagtcacacaatcaactgcggaagagccagccagcggataaagaatccagtgttgggctgggtgcagtggctcatgcctgtaatcccagaactttgggaggctgaggcaggcgggtcatctgaggtcaagagtttgagcccagcctggccaacatggcaaaacctcatctctactgaaaatacaaaattagccaggcgtggtggcacgtgcctgtaatctcagctacttgggaggctgaggcaggagaatcacttgaacccgggaggcggaggttgcagtgagccgagatcatgccattgcactctagcctgggtgacagagcgagactccatctcaaaaaaaggaaaaaaaaaaaaaaaagagaatccactgttggaaatcacaccaacttggacttgagaaaaggccactttaggataagaaccctgggctgagcagaaatagctagctggtggctggtgagtagccaccaggccatagtaccctggcatctgcccatcagctgatagacaggcacaagtgtgatatgctgtggatcagatgcctctgggatgccctgtccaagggaggacagcaaaggtgaacagagcacaaagcctgccacagcttcagccctgagcttcagctctgagatgccatcaggccaggcctggttgaatccagtggtggctacatgtggtctggattcaggggacctggggtcaaatcctggctctgccacttggcaactgtttgaccctacactgagtcgtgacctttttgtgcctccttttcctcctctgttcagatcacttccataatgatcttacaggtataatgtgaatatcaaataatagggcacttgtaaagtgctgagcccagtgcctggcaaatagtgaagcctcaattaagtggttaaaaagaaatttttagggccgggcccggtggctcactcctgtaatcccagcactttgggaggccgaggggggcagatcacctgaggtcaggagttcaagaccagcctggctaacatggtgaaaccccgtctctactaaaagtacaaaaattagccgggcgtggtggcacgcgcctgtaatcccagctactcgggaggctgaagcaggagaatcgcttgaacccgggaggcagaggttgcagtgagccatgatagcgccactgcactccagcctgggtaacagagtgagactctgtctcaaaataataataataataaatttttagagcagtgaggtgagggttggagcctcacctttaaatttttgcagagagggggtctcgcttattgcccaggctagtcttgacctactggcctcaagcgatcctcctgctttcagcctcccaaaatggtgggattataggcctgaaccaccactcccggcctcaactaattgttatttttcattactatctcctcctgggcaccctcatgagccaattaccccagaatccaggtgcaggaggacacaaggaacaaatgctttgtagccactgcctgtgttgtctttggggcctgcccaggctaaaagatggctgcagacagctgctcgcctgccgcaggagagggaggctcagggcagcaggcctggctgcctgaggagggagacagtggcagctggaggacagggacacaggagaagatgtcctcaacaaaaggctgctcaggaaccacaaagggtcgattgttctagttgaggactgccaagggcctggtttctcagactttggtgacctcaacttgtggcaagaaatataaatttcaggccgggacgggtggttcatgcctctaatcctagcactttgggaggccgaggagggtggattgcctgagctcaggtgttcaagaccagcctgggcaacatggtgaaaccctgtctctactaaaatacaaaaaattagccagtcgtggtggtgtgcgtctgtaatcccagccactcgggaggctgaggcaggagaattgctggaacccgggaggtggaggttgcagtgagctgagattgtgccactgcactccagcctgggcaacagagcaagactccatctcaaaaaaaaaaaaagaaaaagaaatataaatttcatgctgactcagtaagtggacacctatccaccacatctgaaataagcctcctgtagtaataaccacggcacaccctgccacagctctcgctatgttccaggccctgctctaagcatttgcatttttatttatcttttaaattttattactttatttttttttagagtcagagtctcactgtgttgcccaggctgcagtgcagtggtgccatcatagctcactgcagcctccaattcctgggctcaaacaatcctcccttctcagcctcctgagtaactgagactacaggcaacgcccccatatctgactatttttttttttcttgtagagatggcgggggggtctcactatgttgcccaggctggtcttgaacgcctggcgttgagtgatcctcccacgatggcctcccaaagtgctgagattacatacatgagccactgcccctggtcctatattaatttatttagccccgccaataaccttatgagttagatactataatcattatcctcattttatgaaacaggcctggtcaatcagagtgcagtaattcactcagcaatggagaagcgacccaggtctggccaatcagaggcatgggggcaggcatttgactcaaccgggaccaatgggagccaatctctgctgtttggtttgaactactgggaaaaggtgctctctcggtggcagctcctaggctagtggaacctgcatttgcagctgccaggagttacctttaccccaaaacaagaaaagcagcatcagagagagttatgatttttaacaaagtggaagcacctggacccagccgtgcttcaagctggattagagccaacacactcctttttggcttaagccagttccagctgggtttcttgctacttataaagaaaaggtttcaataaatggttcaagtggctggggatgggaggtcacttggggccaggagccaggcaaagtggcccaatcctgacaggggactcacagcgttcgctctgcatgtaccgggccaccccttccaaggtcagctcgtccagcagacgctccttctggctgcccaggctgagcgtctgggagaataagttccgcaggaagtccactgaccggaaagaagagagacagcggcaggacgggcattcagccaggggcatggatgtctccggcaccctggccccagccctggggttcccggcctccccacatctaaaggcacaaggcccggcccagccagcggcctccaggagcctgctctggcactggtacccaacccactgctacatactttggatgtcactcctgatggagttgaggaggtatcacccacacccctgccctgaaatccccccgccccccagaaccctgctccctgtccctccaggaagatactcactgtctgcttctccaccagcggctcctccctcagagtctgaatctgagtcctggaaggggtggggtggagtggccaggcccgagaggtgggattagggagggaggagagggggtgataccaggtttggggaaaaggctgtggcaggaaggtggcctgaggaagtgcggggtggtggagagactgcactggggctagctccagggctctgggacaggctgccggggttggagtcctggccatgcccgtccccaggagcaagacctcatgtgagtggctttgctttgcttttcttttttgagacagtgtctcgctctgttgcccaggctggagtgcactggtgcagtcacagcttgctgcagcctcaacctcccaagctcaagggatcctcccacctcagcctcccaagtagctgggaccacaggcacgtgccaccatgccaggctcattttttgtttgtttgtttgtttgctttgtagagacgaggtcttcctctgttgcccagggtggtcttgaactcctgggctcaagcaagtctcctgcctcggcctcccaaagtgctgggattacaggcgtgagccactgtgcctggtcgtgactttgattttctaagtcttggtgtccctcaccttggaaagggagcttgggtgctgggcgcagcaccaggggcgggggaagtgcttggtaagcgctggctgttgctgttattatcacagcctggggtcttcccttcgttcccgggtcccctggagcgtgggcctgctgtcccttcccagcagccctgggggcctctgaataatgtcccaagtcactctgggaatgattccaatgcaaagccttggccctcacttcaaggacctatgtgccccctgctcgaggcctcagacactctgcccacctctccagcaacctctgtctccttcctcgaagcctcccctcagcccagctccagactggcaggtctctgggactctgtccagggcctctctgctttctctttccactttcctggggttacctgtctcatccatgccaatgacctctgcctcgtcactcatgataccatctctctgccctcagatccggggttccctggcttcctggacaccttgccctaggtgccccccagcctctcactcctactatgtcccaaatggaccctggcatctcctccaagcccatcctcctcccaggcctcatctcaatgcgatcgtactgtcccccccatcagccagatgtttcctgcccccgcctccctcctcgccctcctgccacagcccttcagctccagagcatgtacgctgagcctcctaagggtctgtccaccaaccccctttccctccccggcgctccacctggtccagcctgtcctctcctccgggggtcctgccccagcctcctcccccagcctcccagcctcagtctccacctcccatccaccctgctgccctgcatgtgaggctgtctgggtcagctcgcccctctccacttcaaaggcccttctctctggcttctgcagtcttcccagacatctatggaattgccaggatgtccacaagggcagggactttgtctgggtgcccagcactgagaacagggtctggctcctggcaggagctccaggagctcctctaccttggaatgaatgcctgcttcaggctggaccacggctgggccctgcaatggatttcaccaaaatgcagttctgaccaagccaccacctcagacaactcccttccccggatactcactgctctgcgtccaagtctttttgaataagaccctcccttccgaacatacgacaatttaaaaaattgctttttaagactgtgcaactccggctgggcgtggtggctcatgcctgtaatcccaccactttgggaggctgaggcaggaaggttgcttgatgccaggagttcaagaccagcctgggcaacacagtgagactctgtctctatttaaaaagagagagaaaggctgagcacggtggctcacgcctgtaatcccaacactttgggaggctgaggtgggtggatcacgaggtcaggagatcgagaccatcctggccaacatgatgaaaccccgtgtctaataaaaatacaaaaaattagccaggcatggtggcacgtgtctgtagtcccagctattcaggaggctgaggcaggagaatcgcttgaacctgggaggtggaggttgcagtcagcgagatcaccccactgcactccagcctgggtgacagagcgagactccgtctcaaaaaaaaagagagagagaaagagagagtgagaatgagagagagagagagacagagagaaagagagattggacaacctctgcaaaaaccttgattatactcatgtatacttcaacaacatataacttgcggcactcaccttgtaattgcccaagcccacccttataaagataaccactgttagctaagcttaatggaaattactccagttttctctgcataaaactaatattttttacagaaataggtcatagtacaatacaacatcttgagttttcggcagaacaatatgctacagacccacctaatttaaaaaataattttttaaaaaagagacggcatcttgctatgttgcccaggctggtctcaaaactcctgggctcaagtgatccccctgcctcccaaagtgctgggattacaggtgtgagccaccgtgcccggcctcacctcgtttttcagagcagctacatagtattggattgtatggatgaaccatagttcatttaacccatccactgacagccatttggactgtttccagttttgccctgtgacggacaatgctgcattttacatcctcgcctctctctctttgggactgaggatcctttttaacattcaacctttttctctgacagtggtcgtgctttgggagccaggcgagtgagttgccacagcctaacaggaggctcttatatccttagcaaagctccactgtgcatttgtgaggtattctgatgcccgcttctgcaccaccccacgtctgaaaggcaatctcaggggtgtgggtgggctggcactctttcaggctgtacacagtgaggctgtgtggaaggcctgtgcccagcatgtgtctgcagcttggcctaagggagagccggaggtgctgacgggggccttcaagctcctatgagactgcctgtccacctctcctggcagcctctgacaggtggcgtgcccagtgctgggggactcaaacccttccctgctcctgtagccgagggacgggggataagtgacttaacaactctgcctcagattctgcatctgtaaaatggccgtgataggcgtttctcttcacagggatgccaggaagatgaaattgagatgaggcacgtttggcactaaacagtgggcccagctttagtaagccgtcagtaaatgctaaccacgactataacaagctgaccaccaccagccacccaattatggaacacatcacaccccttcatgccccccaggtctttgcacaagcgatacctgttgtgtggatcaccatttctcaccttgtctaagaaaattctaagtcactcttcacttatgctgtgtctgtatcttggtctgacagctagaccagcctgtggattcctccagggaatggcctggctagaatcttctttgacccagaaaattttctctgtgctcccacagtaccctgagtttctttacttttcttcctttttttttttttgagaccgtgttttgctctgtcgccccggttggggtgcagtggcacagtcaaggcacactacggccttaacctcctgggcttaagcaatcctcccccaactcagcctcctgagtagctggcaatgcaggcatgcaccactacacatggctaatttttaaatattttgtagaggtgggggcctccctatgttgccaagactggtctggaactcctgggctcaagcgatcctcctacctcagcctcccaaagtactgggattacaagcatgagccactgtgtctggccctgagttactttctttcttttttactttttagagaaagggtcttgctctttcaccccggctggagtgcagtgatgcaatcatagctcactgcagcctcaaactcctgggctcaagcgatcctcgcgcctcagtctcctgagttattggaattacaggcataagccactgcatctggccccctgagttactttcgtcatcacgctgtgagatcattttttcccatcacttgtccacgagatctgtgcgttccaagaccaaatgggatacctgtctcttccagtcccaggacaaatgtggttcagaagggatggcaggcagtggcaaggaagaaggaaagtttgggaggacaggcctggacttgaggctggaaactcttctctgacaatccccagaatctgcctttccccagaaagctgcactgggtggtgtgagggattggggcaatgagccgagggccctggggtgactgtttcccctttgccacctccccccagtgtgggatgtggaacaagtccgtctctctcctcccctccaccctttcccccatctcacctgagcctcctgcaccttccctgcctgggtctccagagggtgagaggctgggggaggggagcagaggtggttacagtggggagaacgattaaggggggaataaaggggttcaaatggtcagtgagggggcaagaacacccaccaacctagttacactgggatgggatggtggtaaaaatggagcagagggagggaggggacggagaaaagatcttatctacatgcaaagtgatgccgggagaggtgattagtgaggggcagagaggctggagaggaagatttagggggacagggagaaagtaggggcttttgcccaggctggtcttgaactcctgggctcaagcgatccaaccaccttggcctcccaaagtactgggattacaagcatgagccattgtttctggccctgacttactttctttcttttttactttttagagaaagggtctcgctcatgtcacccaggttggagtgcaatagtgcgatcatagctcactgcagcctcaaattcctgggctcaagcgatcctcctcctcctacctaggggattcagggcatgaaggaacactcaggaggagttaggaaggacacgacagtgtgtgagtgtgtgtgcggggagggttagatttacaaggcagagggaagtttagaaaggaaaagagaagggaagagacgctttggctgggaggcaggtttaggagggaggtgcagtggtgcagtggaggcggtaggtttaggagaggcgcggaacaaggggaagccataggaggggtcagcaggggtccctcagcatcctctggttgcctctaacaatcaggtacccatagcaagcgggaccggggcaacttatgttctttgcagcgagggaccttagcaaccaaggtgcgagaaacacgcgatcattggcaacttggcaagtggatgtggtaaacgaaccctgaacacactgcgacccagaaacccaccagcctagcgatacagatcgctaagcaacagccctcagaatcccactccccgaagcgctccctacttcccgccccaccgcggccacccttgggccccggggcctgcagcattcagccaggccccggcgcggcccgaccctcctacccggatccccgactcacggtctggctctgccatgggcgcggtgctgaagcccttgaggctgtcaccgaccgctctgtcccgtcaccaaccactgtgtcccgtcaccgactgctctgtcctgtcaccgactgctctgtcccgtgacggcaccagaaatgggagtggccgtgatagggcacagaactacaactctcagcagacattgcggccgcagacgcgctttcgtacaacacccagagcgccccagttaggtaagaaagcgcgcgaggaccggactacgagtcccagaaggcgtggcgtcagcagccatgttggtaaagggcgcccggaaaatgtgggaacggctagagagttgtagtcctcccgaatactctgattggtcaggatgcagtacgagggcggggtgtgagcgattcagcatattatcattgggtgaatcagggggcgtggtggggaatttcccgcagggcggaagctccagaactcccggcaaagcccagctacaggcgggcgactgcggggggcccctgaggcggcgggggccatggctggggtcgcgtgcttgggaaaagctgccgacgcagatgaatggtgcgacagcggcctgggctccctgggtccggacgcagcggcccccggaggacctgggttgggcgcggagttgggcccggggctgtcgtgggctcccctcgtcttcggctacgtcactgaggatggggacacgtgagtgaaccttaggctgccaaacggagccctaggacccggcgtcacattcctcattaatctctgatccctgaggcttcctaacctcatactcctaaatctgacttccgatgctgaacttcctgacctctaacccccgagtcctaacttttaacaaaaccaatcttctatctagctatgatcctaacccaatcatttcttaccttcttttcttgaactatgattctcagctcctggaatccacattgtatccactgatacccaaacctgactccagtcctgagacttctgttagaactgtggcttctcctgacttctaacctccaaatatgatctttgattcttagttcccgatttgagccctagagtttgatttccgaaattaatacttggtccctgactctaagatcctgtcttctgagcagtgttcttcaaatcttaaattcaaagagagagaatgtaagctcttctatgttgaattcctaattaaagtaaaaaaataggaaaattaaaaaaaagaatgttagctccatgagaccaaggattcatctgttaaacaaatattctttacacattaccacgttccaggctccgtttaggtgctagtgataaaggcagtgaagaaaacaaacaaaaacttaagcccttgtggagcatacattttagtggagctaaataaacagattgataagaccacaaggaaggaaagaaatggaaagacaggaagaaacaaagaaagacacgcagaaagaaagaaacatagaaagtaagaaaaggaaataaagtcagaggtagttaagtactttggagaaaaataaagcaggaaaatgaggcaatagataaacaagataagagcatttcaaggagaaggaactgcagttgcaaaggcccagatgagggattgtactgggttttttgtctgttgtgtttactgctgtatgcccagtgatgcaagcagggcctgatccaggaggcactgaatattgatctcaaccagctttatagtctcgttaattttcattaaatttcattaattaattttggtttcattaatttttttttactttctattcaattggtctctgttctgacttttttttttgaaacgaagtctcactctgtcgcccaggctggagtgcagtggcatgatcatggcttactatagccacaacctcctggctcaagtgatccttgcacctcagcctcctgagtagctgggaccacaggcacatgccaccatgcctggcaaatttttaaatttttttgtccccctatgttctcaaactctttttttttttttgagacagagtcttgttctgtcacccaggctggagtatagtggcactatctctgctcgctgaaacctctgactcctgggtttaagcagttctactgcctcagcctcccaaatttgggattacaggcacgtgcccccacacctggctaatttttgtatttttagtagcaacagcagtttcaccatgttggccaggctggtctcaaactcctgacctcaggtgatccacccgctgtggcctctcagagtgctgggattacaggtgtgagccactgtgtgcagctgtggtctcaaactcttgagctcaagcattcttcccaccttggcctcccaaagtgctgggttacagggatgaaccactgtgcccagacagtctctgccttttaattagtgtttagaccatttacatttaatttgatattgatatgattgtgtaaatttatcccatgtctattatatatattctacttacctatgttttctttttcctccctcctttttgccttttattgggtatagtttttgttacttttttttcaatcctgctccttctgtatagtgtttttcattttatttctttttttttttttgagatggagtctcgctctgtcacccaggctggagtgcagtggtgcaatctcggctcactgcaagctccgcctcccaggttcatgccattctcctgcctcagcctcccgagtagctgggactacaggcacctgccacttcgcctggctaattttttttgtatttttagtagagacggggtttcaccgtggtcttgatctcctgaccttgtgatccgcccgcctcggcttcccaaagtgctgggattacaggcgtgagccaccgcgcccggcctcattttatttcttttgtttgcttattagatattcctctttttgttatgttagtggttgctttaaggtgggggttggcaaactatggcctccaggcaaaatctagccagccatctgcttttgtatggttgtgagctaagaatggtctttacatttttaaacagtttctaaaaatcaaaagaataataatattatatggcttttgtatggttgtgagctaagaatggtctttacatttttaaacagtttctaaaaatcaaaagaataataatattatatggcaagtgaaagtgtatgaaattcatatttcaagctccataaataaagttcttttggaacgcaagcaagctcactcatttacatattgtcagtggctgcttttgcactgacacagcagagtcgagtagtcaaaagaaactgtatggctgctgggctcagtggctcatgcctgtaatcccagcactttgggagccaaggcggacagatcacaaggtcaggagatcgagaccatcctggctaacatggtgaaaccttgtctctactaaaaatacaaaaagttagctggcagtggtggcgagcgcctgtaatcccagctacttgagaggcaggagaatcgcttgaacccgggaggcggaggttgcagtgagctgagatcacgccactgcactccagcctgggcagcagaacgagactccatctcaaaaaaacaaaacaaacaaacaaaaaaagaaaaagaaaaacaaaaccaaaaagagaaaccatatgacctacaaagactaaaatagttatctggctccttacagaaaaagtttgctgactcctgctgtagggttgatagtttacaactttaggttatcatgggctaccttaaagtgatattatgccatttcacatagagtaaaagaaatttattttattttattattattatttgagacggagtctcactctgttgcccaggctggagtgcagtggcacgatctcagctcactgcaacctccatttctcaggttcaaatgattgtcctgcctcagcctcctgtgtaggtgggattacaggcgcatgccaccatgcctggctaaattttttttgtattttttgtagagacagggtctcatcgtgttggccaggttggtctcaaactcctgacctcaagtgatctgcccgccttggcctcccaaagtgccaggattacaggtgtgggccaccgtgcccagcataatgaactgttttaatattcttgtttgcaaattctaacatctctgtcatttctgggtcagtttcaattcactgatggttcctattatggatcatgttttcctgcttctttacatgcctgataatctttggttaggtgccagacattgtgaattttgccttgttagtctggagaattctgtattcctataaatattcttgaggccgggcgccgtggctcacacctgtaatcccagcactttgggaggccaaggcgggtggatcacgaggtcaggagttcaagatcagcctggccaacatggtgaaaccctgtctgtactaaaaactgcaaaaattagccaggtgtggtggcacgcacctgtggttccggctactcgggaggctgaggcagaagaatcgcttgaacccaggaggtggaggttgcagtgagccacgatcgtgtcactgcgctccagcctgggcgacagggcaagactctctctcaaaaaataaaaattaaaataaataaataaataaataaataaataaatattcttgaatattattctgggatggagttaaattactcggaagtagtttgagtctttccagttttgcttttatgatttgttaggtgggtgttgagcagtgccccatctacagttaattattccccactattgaggcaagaccttcctgagtatcccacccgatagcctgtgatgatgtttttccagcctggctggtgggaacactcactattcctggccctgtgtgagtaacgagcacttttctgaaatccttttggatggttttcccatccccacagactcacaggcatggctgatccgtattctccggaatacacaagagaacctcctgcagttccccagcaatctctcctttggcaactctgttttgtactctgtcctgtgactctagccacgctggcctccacagactcttcctccatatccatctcctgacctcagacaacctgatgcgctctgcttggattcccctctctgcaccgtggctttgaaactctctcaagacaataagctgtggcagtcaagtgtggggcccacctcgtgtttcctgtctttcaggggtcactgtgattcattgcacgatgtccagtgtcttcaacactgttgcttcatataccgtatttcgtctgactcttgtttgtttgtttgtttgtttcacgtgggagtgaattctggtccatgttacttcattttgggcagaagtggaaatcccactgaataaacattgattccacgaatttgctgatgaaactctgacctctgacctcccagatagctgacagggggttccagaactgtggtcacaaggcctagcatacagtaggcgccccatgtttgttcaatgaaggaatgcaagaggacttgaactttgccctctcaccccggtctttgtccccagggcactgcacttggctgtgattcatcagcatgaacccttcctggattttcttctaggcttctcggccggcactgagtacatggacctgcagaatgacctaggccaggtgagccacgagggatggtgtagggcttggggtccagggttcccagtgtgactccctaccgcctgtcctctgcttctgcagacagccctgcacctggcagccatcctgggggagacatccacggtggagaagctgtacgcagcaggcgccgggctgtgtgtggcggagcgtaggggccacacggcgctgcacctggcctgccgtgtgggggcacacgcctgtgcccgtgccctgcttcagccccgcccccggcgccccagggaagcccccgacacctacctcgctcagggccctgaccgtactcccgacaccaaccatacccctgtcgccttgtaccccgattccgacttggagaaggaagaagaggagagtgaggaggactggaagctgcagctggaggctgaaaactacgagggtgagggtcgtcaccagggaaggactcagctcctgggctaggcgagagcacctggccctgggctcagcttccctgatttgagactgagctccttgggaaatcatgcctaggcttcaggagcccacacatcgggaccagggacctccactcagggcccagatgattgagaattggatatgtaggacccaggacccccacctggaggccccaggtcacttgggatgcagacctgtcacccacagacccagagctgccaggatccagttgtcgggcccccgggctccccacctgcagagtgtattgcagacccctaccctacccaggaccggggaatgcagagctcaggccctctgtgaaactctggcaccccaggctcccagcaatgggcagcagggttcagagacagccctcctcagcctcatgggaagaagggctcatctgcccacagccctgacatccaagtttctgctcccctgcctataagcccagccacctgagaccagacccctcctcagatggactgacgtcattcaggacccagtgttcagggcctgcctctcgcccccaggtcacaggcttttcagctacttggtaccttttttttttttttttttttttttgagacagtctcactctgttgccaggttggagttcagtggcgtgatcttggctcactgcaacctccacctcccaggttcaggtgattctcctgcctcagcctcccgagtagctgggattacagggattacaggcacatgctaccatgcccagcttatttttgtatttttagtagagacggggttttaccatgttgaccaggctggtcttgaactcctggcctggccttaggtgatctgcccgccatggcctcccaaagtgctgggattacaggtgtgagccaccgtgcctgggcaggaaccttaatttaaggtttttttttttttttttttttgacatggagtctcactctgttgcccaggctggagtgcagtggcgccatctcagctcactgcaagctccgcctcctgggttcacaccattctcctgcctcagcctcccgagtagctgggactacaggcgcccgccaccatgcccagctaattttttgtatttttagtagagatggggtttcaccatgttagccaggatggtctcgatctcctgacctcgtgatccacccgcctcagcctcccaaagtgctgggattacaggcgtgagccactgtgcctggcctttattttttatttttagtagagacgtcttgccatgttgcccaggcagcttcttgaactcctgagctcaagtgatcctcttgctttggcctcccaaagtgctgggattacaggtgtgaaatagcgtgccagctcaggtcctttgagtgataagagcagagacttgggtctcctcctggccccaaaatccaggctccctgtccacagaccccaggctgtttacccgcgggccccaggcttcaaacaactcaggcactagcacttgccagcaagctcaggccatctgagataggcatttggtacccaggtacctctttgccatacccaagaattcaggaaccagcccccaaacctaatcaccctcacgccacatgaccctcccccaggatcaaagcacggtggggtggggggggccctcacctcatcatctgacgccaatcactctgtccccaggccacaccccactccacgtggccgttatccacaaagatgtggagatggtccggctgctccgagatgctggagctgaccttgacaaaccggtgagccccaacctcggggaagatgccgtcggcgggagggggcttgtcccctcttcgggccctctgacctttctgttgcacccccacaggagcccacgtgcggccggagcccccttcatttggcagtggaggcccaggcagccgatgtgctggagcttctcctgagggcaggcgcgaaccctgctgcccgcatgtacggtggccgcaccccactcggcagtgccatgctccggcccaaccccatcctcgcccgcctcctccgtgcacacggagcccctgagcccgagggcgaggacgagaaatccggcccctgcagcagcagtagcgacagcgacagcggagacgagggcgtgagtcaggaggagagacagggcagcccagctggggggtcaggatagaccggcaggcaagaagcccaagaagataattaggcaccgaccttgggctgctgttagagaactcaggcagcagcgccagtgacacggggcactagtcaggagagacctggacaggggtggtgggaagagcttgggcagaagtggctgaaaaactaaggcagtggcaaaggtagaactcaggcaggggtggagaaaaggcgttggtcgcagtgattggtgaacacagcgggggtgggtggtagcgctgggggtgattttaggcagcaagaattggagaactcacactgcgaaaagaaaaccttgggtggcagtgatttgaacaccggcagtgctggggcaggacccgagccagcggtggggagagatatagtcagagaacccagcaatacagatccgtccttgggcaaggcgcggtgctggatgatgggtgcggaggaatttgggtaaaggcagagggaaggggtggaggagggccagctcagttgccgaaactctggagtggcggctggctagaaattggtctgtagaaatgaccttgaaaatggagttctggccaggtgcggtggctcacgcctgtaatcccagcactttgggaggccgaggcaggcagatcacgaggtcaggagttcgagaccagcctggccaacatggcaagaccctgtctctactaaaaatacaaaaattagctgggcgtggtggcgcatgcctataatcccagctacttgggaggctgaggtaggagaattgcttgaacctgggaggtggaggttgcagtgaacctagatcacgccactgcattccagcctgggcaacagagcgagactccatcttaaaaaaaaaaaaaaaaaaaagaaagaaaagaaaatggagttctgagagctaggaaactgggaggttgagccaggagcaggggaacttgggctttgaggcgagacctaattcttagggtgctctatgaggacatgggtggtgggcaaagtgacagccgcctgagcccctctgcctggtcccctttgcccccaggatgaatacgacgacattgtggttcacagcagccgcagccaaacccggctgcctcccaccccagcctcaaaacctcttcctgacgacccccgccccgtgtgatttgtttcattgttaatataatttccagtttaataaacaaaaccctagttctgacaaccagagaccagactgatcttgtcttcccagtcctccgggtccttctggggcccatccctgtcacatcaagtgctgctcacggaggcagggtgcgtttctttgtgctttattcactcagaagggttggagtgggagtgcataggtgtgggggtgcttcctgtgtcagggctgagcccagcccccggcccagctcagactcacctccttgggtgtggttccaaggcacgtccgcctcctcccctgtttgggtaggggtggcgtggggtgctaggtgaggtggaggcttcggggtcaacagtcctaagccacagggtgtgtcaggaggaaggagggactgaggtaggggtcagccctccctcctgagctgctcccccagcgtctctgtcaccttcttcagttcgtctctcaagtgctccagctgctccacctccttttcctggtggggtcagaaacggggtagtcagcacccaccttcaaaggcaggccacctcggtcactgtgattgtgggccatgtcggttctcatagtggcatccagcagcggtcgttctgatcgtcgtggaccgcgatggtgaccatgctgattgccataaccccggaagagtggtgctggctaacgcgaccacagccaacagcagtagcttggcactggcaaaggtgcctgggatgagcacctcgtgatggcgctttatttttatttttaagatggagtctcgctctgtcacccaggctggggtacagtggcacgatctcggctcactgtaacctccacctcccgagttcaagtgattctcctgcttcagcctcccgagtagctgggattacaggcatgcaacaccatgcctggctgattttttgtatttttagtagagacagggtttcaccatgttggccaggctggtctcgaactcctgacctcaggtaatcctcccgcctcagcctcccaaagtgctgggattacaggcacgaaccaccatgcccagccattttttttttttttttttaagatggttttgctctgtggcccaggcgggactgctgtggcacaatcatgactcaatgcagcctcaaactcccgggttcaagcaatcccaccacctcagcctcctgagagctgggaccacaggcgtgcgccaccattgctggctaattttttaaattatttgtagagtcacggtttcactatgttgcccacgctggtctcaaactcctggcctcaagggattctcccaccttggcctctgaaaggattaaccctccctaggattacaggtgtgagccaccatgcccaccctgttacggcacttttggtgccaccaatcatggtgacatcttgttttccatgacccagcaatggtgtctgtctgtcacctagtgaagtaggcacagcagccacttttcacagtggccaacttgctagtgatggtggcttgcttctgtgcaatggtgccatcttggttgctgtagtccatacagtagtgtggaagtataaggtaaaggccttgcacggaagttgttagccagtcgtggtgtcagtcttggccactgtgatccactagtgatggatctggtggtgcagggccaacaccggtggctgtgagttgtgactccactgaccatcatcaaccctgcctccaaactgtgttggtgttcctccttcatccccctactcacctccctctccgaagcctcctccttctcctgcctgggctcagcctctggctggtggtggtggtggtggtggtggggcaagtcctcgcgcctctctcctccgcctctctcggccccctgccacaggctgcggtccccgcccagcacccgcacccccttctcctctgcctggaactgggccgtctctttgtcactggccttctctgccacccgcttctggaggtcccctccattctctagatgccgctgccacaggtcctcaaaggtctccatgggccccctcttcctctcctccttctcctcctcctcgtcctcctcctggtggagctggcgatgcccttgcatgcggatggcttgttcctggacctcagacttgtgggtcctctctgctacctcctcctcttcctcatccctcacctcctggctggacctcatcttcccagcctcctgcttcttgaaatccccaagcagcaggcctttctcctcggtggacgcacagccgtggggctctgtcccgcacaactctggcagaaagggaaaggacactctctaagcatccaattgggaaactgaggccgagtatggaggctcacgcctgtaatctcagcactttgggaggccgtggcggccgatcacctgaggtcaggagtttgaattgggaaactgaggccttgaggagttctgggccctgccgaaggtctcacaggggggctgcccagactacagggggagggtcctatttcatcccacctgggaggggatgttccctgccccatctggcccctctgcagggaaccacaagggtgttgctggtggccaggctctgtcaggtgtgaatgctgggcagtgccccgctggtccaggcaacagggctctgggaatgaggacctcttcctccaggtagcctgggtgggagagcatgtgggcacctgggcaggaccctgggtggggtagggtagggtcccatggggttgtggagggcaagtggggcccggggcctccttacccttgtggagaagagcagtgcagggtcctctctggacctggcccacggtcagcacctctgtgaccacctctgccagacagcgggtcagctggggggcaggggtgccgggtcagaggggaggttgagggcaggggagatggggaggagagcagctggtttgagggcaatgaggatcatggggcaggctgtgcagggagggcagggccccagctaggtgaggcagggcaaggcctccacactcctcacctcctccttggagggtctcggtgccaagggagcagcggtggctgtggagaaaggagatggcactgggctttgccgccctggctgctgtccccggtaccgaccccagctccatgggcgtcccggtccccacacatcccctccccatcccacccggcgggtgtactgtcccccgctggaggctcggcccctgaagcctctccactgggtgcactgcctgccccctcccactggagtccccgctccccggcccctggcaggtcccgcactcggcaggtcccgcactcacccgcccccagcaggagcagccgcagcagcagcagctcagaggctggccctcggggcggcatggtgggcgtccaacgggtccaaggcgctgtgcgggccagggttgcagcgccttataacccacgcggggaccctgcaggggaggaaatgatgtcacccccgccccctccccgcccgcggcggggcgacatctgcggggcggctgcctgcctgagaccctcaattattcatgaggcctccgccctgcacgcgctcccctcgaggcttcaggccaggagctcagcgcagatggtggaggcctcccttttttcgtttttttgagacacggtctggctctgtcacccaggctggagtgcagtggcgccatcacagctcactgcaggctcctgaacacacttgatcctcccacctcagcctcccgagtagctgggaccacaggcgtgtaccaccatatctggctaataatgtttattttttgtagaggcagggtctcactttgttggccaggttggtctcagactcctgggctcaagtgatcctctcgtctgggcctcccaaagtgctgggattacaggcctgaggtgccacacctggcctggggggatctcttcccagagcagcagggtctggtacactcgccctccacgctggcaggtggaccggggtgggaacccagaagcagccactcacagatggtccccaggcaactccttcccttcctgggcctgttttctcacagggtcttgttacaggctggagtgcagtgcctcaaactctcacacaagggatcctcctgcctcagcctccagatcagttgggactgcaggcttgcattatcatgccacagtaatttttttcattttttgtagagaggggttcttgctatgttgcctagactggtctgaaactcctgacctcaaatgatccgcccacttgggcctcctgaagtgctgggactacaggcgtgggtgagccactatgcttggctgagagtgggtctcataaacccgcttcctcagaggctgcagttggcttctggcctaagccccagctccaccacgtgccagctgtgcagcccaggataaccgcttaacttctctaagacctgtttcctcactgtaaatagggttggtgacaacctactctacagttggacagtgaggattaaatagttgtgtgtacagtgtttagggaagtgcctggtactgggaacggcacacgtccaagcatcttcagtgcagtaatttttgttgagcatctactacatgccaggtcctcttttagacctgaggctacagccctgagccaatgggtggatacctctgccctcctggagctggtatttgacacacatcaatacatattaaggaaagaaggcagaaatgcatcaaaaatatagtatctcaggctgggcgtggtggctcatgcctgtaatcccagcactttgggaggccaaggcaggtgcattacctgaggtcaggagttcaagaccagcctggtcaacatggcgaaaccctgcctctactaaaaatacaaaaaattagccggacatggtggcacctccctgtaatcccagctatgcgggaggctgaggcaaaagaatctctcagaggttgcagtgagccgagatcacaccactgcactccagcctgggacagtgagactccatctcaaaaaaaaaaaaaaaaaaaaaaaaaagtatctcagatgtaggtactgagtgctgggggggttttactgtggtcacggaagacttcttggaagaggtgacatttgagctaaggcctgagtgacaagatggaggccagcacacaccatctaggggagagacagccagagagggagactcaccaatgtaagtgcacgagtcaggaaggagtttggagagtttcaatgtcaaggcgggtcgggtggaccaaacaagacagaaagatgggctgaagaggaaggtggagcagctcaggtggggtcttaggggcctcgatgaccactttacccttttactctgagacgaagccacaggagacctctgagcaggggtgggacacccagctgaggtgctcacaggtccctctggctgtgtggcgaggatggagaacagggagccagtgaagaggcttccagggttaaccaaaggggagggatcggggagcagggcccaggtggggtcagggaggagagaacagtaggcagagtctggaaatcttttttgagacagagtctcgctctgtcacccaggctggagtgtagtagtgtgatcccagctcactgcaacctctgcctcccgggttcaagaattctgcctcagcctcccaagcagctgggattacaggtgcccgccaccacacccagctctttttttttttagatggagtctcgcactgtagcccatgctggagtgcagtggcgcgatctccactcaccacaacctccgcctcccaggttcaagtgattctcctgcctcagcctcccgagtagctgggattacaagcgtgcgccaccacgcccagctaatttttgtatttttagtagagatggggtttcaccatgttggccaggctggtcttgaactgacctcaggtgatccgcctgccttagcctcccaaagtgctgggattacaggcgtgagccactgtacctggccagattctggaaatattctgaaggcggtgttgccagggttgctaatgaagtggagtggatatgagataaaagtcgaggctaacccgaagggctgtggcctgggcagccgggagaatgtgctgggatgggcatgcctgaggaggagcaggtgcaggccaagtgatcagaggaccaggtagcttccctgagtttgggatgcccactgggcccctacctggagctgcagaagggacagctgcatggggagctggggactgaggggtgaggctggggctggggtcagctcgaaggaaccctcagagggtgactctgttctggcttgtcccagaggaaggggagagaattcagcatcctctcagcaaccctggtggccccaggccagcctccatgtgcactggggggtggctaggcacttccagccatggtctttgcagccacagaccctttgaggatagtgcctccaagcggctgctcagcagctcctagagagccaggcatctcccttgttcacagatccacagaggcctttgtcctgaccatttattggggactttttgctcagcactgtaggaggaaagaaggaaggagggatggaagcctcttcctctgcttctcctgtccctagaaccgtaaagcccagacgtcctgcttcccactgggaccctcaatgataacagggtcagtgactgactctgaggcagcaaggacagaggagaggtggaccccgtggtccaggggcccgggcgtggagctgacaggaagaacacagatgtcaggacgggctcagcaacacaggtcccaggtgtccggggtctcctgaactccaggaagcagtgacacccccgagggctgctgtgggtgggttcttagcttacagcaggctggccaggcagcccaggcttccggggctggttggggccgatgtactggagaggcacgtgggtaggggctgtgatccgatcagtgccgaggtaggactggagggcagggggcacgagcactgagccgtcctggggacagagcagacctcaggacactgcagatgccccagccctccccggcgctgagctgcctctctgggtgggcccctcagcccctcaccttctgctggttactctccaggagcgcgatgagaaggcgggggacagcacaggcggtggcgttcacctgtgagacagccatgctcggaactggcgcccaccccaagctgagcccggggaggagccaaggtgggtgggtctagggcggcagaggctgcgggcgagggcacgcgggcaggaggctgtgcgggcctcaccgtgtgggcaaactgcagctccccagcctcggtctggaacatgatgtggaggcggcggctctggaagtctgtgcagttggaagcactggtgacctggggtggaggagcggcaggctgagcggatcagggatggggggcaggcctgtcctcctgcccaccccgtccccagcggcacagggctcacctctccaaagcggcctcggcctggcatccaggcctcaatgtcaaacttgcggtaggcggggaggcccagttcttgggtgggcatatccaggaccctgcggtcaaggacgaaggtgtggggaaggtcagcgggtgagaggaggagcaagaggaacaaatggaaacgatggaagagaaggcagccaaaaagcaggaaaaagcccaggagtttgagaccagcctgggcaacataaggagacctcatctactccaaaaaaacaaacaaaaaaaaggagacgatagtgccaaaggagagagttgtgaggccaggggtggttatggagaaggtggtacatggagggggaagcacaaaagaggttgatgggaggggaaaaaggcacgtggcagggtccaccggctcttcacagtggccattcacacatttgcaccttctaggcaccctcggttttttttttttttttgagacggagtctggctctgttgcccaggctggagagcagtggcgcgatctcggctcactgcaacctccaccttcagggttcaagtgattctcctgtctcagcctcctgagtagatgggattacaggtgtgtgccaccatgcccggctgatttttatatttttagtatagatggggtttcaccatgttggccaggctggtcttgaactcctgacctcaggtgatccgcctgtcccggcctcccaaagtgctgggattgtaggtgtgagccaccgtgcctggcctttattttttttttttagagacagggtctcactctgttgccccaggctagagtgcagtggcatgatcacagctcattgtagcctccacctcctgggttcaagcaattctcctgcctcagtctcccaagtagctgggaccacaggtgtgtgccaccatacccggctaattttaaaaaacgtaaagacgagctctcgctgtgttgcccaggctggtcttgaactcctggcctcaagcaatcctcctgccatggcctcccaaagtgctggaattacaggcgtgagccaccacacccggcttacgctcccagttttttacaatgggtcacccagaaaagaagtccacatttctcagcctctcttgaaagctgcgtgtgactgacagggtgagaggaagtggggttcccaacctctggctcccccttttcccacccccactctccactgggaggtgaaaaagtatcttgggttgcacagatgaggcagtggcccagagagagggggagcagcaggaggaaaggggcccgggtctccactctggcacaccgtgcactgttcgtgcttctgttacagtcctgtgagggacgaccggcacacggcagacagattgggatcctgtatatgctcctgtaatccttgtacaggaaaatgggggcaacgagggggctggagaggtggttccagagcgaagagcagctggccagccccttgtccctcccctaccccacccctgccatccctggatccctggcccctctccacaccggaagtgcaagcccagctctgtcaagatctccatctgaagggacaggaactcctccagcagctgtgagctctgctccagcccagggcctgtcaccccaaacatctccacctgggacagagggcacaggagtcaggaggctctgagctcttggggtggccccccaccccagccccgtttagtcccagcgacaccagccttggtgaagtggtgtactcgatacagcccccggggttcctgtcccgtgtttgtctctgcccggtagcaggtgctggagcaaaccatcctggcagagagcagggaaagtcgggtcaaggagggaagactgattgtcacaggtggggtcaaggtctaaggaaaccaggtgtcacctgactggcaggtccctgaaggccacggtgtggtccatgaagtagcctgggaggagagaccacagggtgagccagggctgccagtgcccagaggaagcctttggaagattaagaggcactccctctggtggatgcaaccccaggtcaaggcccggggctggattatcactgtactgctgtacagtaaacaacctacacagccgtacatgttggccctggggctgctgagctgctcggggcaggtgatcccccccagtgctccctggacgctcccagttgtccttccacatcactcctgctcctccccaccacccacacaggtcctcacctgcaagccccacctccgctgttccagccaggttgagatctttgaagcgggcagggtcgatgttgtaaatttgggatgggttggcatttggtgtcatcccacagccttcctgggggaggaggccaggccacagggatcaggggacaggtaaccctggcctctcgttttacagtcccaaccccagctcctcccctgaaaacatctggagctgccctggcctccctggtatggcctggccccctcaacccagccccagggcggtctcctcaggtttccctgcctcgggcacccacggcagggcctgacacccaggtgggcgagggaagcggagaggcctcactcacaaacactgctccgcggagaaggtctggcaccgtcatgggggtgaagccctgttcaggggagaggatgagtgagcagagctgggacccctaccagaccccaagctcagccctgaagaaggggtgctgcagagccccttcctcctcagacgaaactgaggcaggggctggcgcagtggctcacccatgtaatcccagcactttgggaggctgaggtgggcggatcacttgaggccaggagtttgagaccagcctggccaacatggcaaaaccccctctccactaaaaaggcaaaaattagccggcatggagatcgtgctactgcactccagtctgggtgacagagcgaactctgtcaaaaagaaaaaaaaaaaaattagccagcatggtggcatgtgcctgtaatcccagctactcaggaggctgaggcaggagaattacttaaacccgggaggtggaggttgcagtgagccaagattgcaccactgtactccagcctgggtgacagagcgagactccgtctcaaaaaacaaaaaagtacagatttggccacaccctcccctgcttaaaagcctcccatggctccctagtaccctctgaaaatgtctgagttcctcaccgtgaccaatgctccatgcaaccagtccctgccatgtttcaatggatgctatgattcccaaatgctccctttataccgcaagcaggcagtgaggtgcaatgattacaagcacaggctctaggcccagctccagactggctgtgagaccttgggctataggtacctcccctctctgggcctcaagccctctctgtaaagtggggatgatgacagcacccacttcataaagttgtcgtaaggactaaatgtgtcaatgatacacatgaagctctgagagcagtgactagggcagagcagagatcactcccatccccgttgggccctctgagctcagcttcgatgccaccccctccaggcagccctcctatcttggcccatacccggcggagaagcttgttgaatgtgaagttgaccaggccgtgctgcaggagggctccagccccgcgcaggtaataggaccggtggccagacacgtgggacaggcgcctgggagacagacagacaggcgggtgcacatgggccaggctggcagggaatgtggggatgaaaacacccgggggaagaggcccggctgctgggtggggctggggcatcaaagattcatggcatttccacatctcacgctgaggccaatgaggcaggagccagctgtcggggtgcaggcagctgggagaggggcgtggggagccaggggaggggctcacttctgacggatgatgtcgagtttctcgccaatttccaggtggccccgaggttggaaggagaaaactggatgtgggtgaaaagcaccggtgtaaggcagcggggagagagggatggggcccagatagaagcttccagagacagcagagaggagggacggtgagagaaaataaaggaggggcaggaggagagaagggagaagaagacacggaaagggagggaaagggaagaaaagacagacaggaagggagggagataaaaacagagacagggagaggaaatgagaggaggcagagagggaaataagagggcgcggggtggggaaggcagagttagaaacagaggagagaggccagaggagaaggaaacaccacgaggaagggaggaggagaatcagagaggaggcacagagttggggagaaaaagccccggagacagggaccaaagcaggggggtcagagagagagacagagacacacacacactcacacacatacatacacacacagagatacacacagaggtacgaagacacacacacatatacagacacacagagacagacacatacacagacacgcagagacagacacacagatacacggatacagacacacaaagacagacacgcacacacagatacacacaaagacacagatacacagacacagatacagacatacacacagagatacacggagatatgcagatacacacacagacacacagagacagacacatacacacagacacagagaaagacacacagatacatacacacagatacatagacacacacagacacacacacacacaaacacagatatacacacacagagatagacacacacatagacacacacacacagacacagacacagatacagacacacacaaacacagacacacacacacagatacagacacacacagatacacagatacagacacacacagatacacagatacagacacacacatacagatacagacacacagatacagacacacatgacacacagtcacacaacacatacatacacgacacacactcacacacatacgatacaatcacacaacacagggtgagactgcccaatggtgaagggggagagaatgaaaacccaaggaccgcctctcagagacagctcgagctcggccaaggcaggaagctggagccacctcctgtaccgccaggagttctccaggctccagacatgttcccagaccccaggggcccccaccccgagaccccagaacccccacaccgcagggcttgtcagctcccaggcctggggtgtggcccacctggcttgtctccgaccatgtggagcactcgagcctggctctcatccccgacgggctgcagggagacagcaggagtcacggaaaggtggcactaggtgggcccctggcctccctgccacccagcacggtgctcaccacgtctgggtgggtctggttgggcagcttcagcgcctgcaggtagaactgctcctcaagctgggcctccctggggtacaggtgaacaagctccttccggatctcccggccacgtgcccgcagaccctggtacttggggtcctgggggcagcacaggtgggctcagcccgggagagggtcaggactccctcatccagtgtgaccttgatcctgaccggcagagcccctgtggtggacattcatgcctcttctccaggcccaggatcctgaacgtcttcgcagaacttcccttaccaccacatggcaggtttgtggggaaaagaatcaggcctggccaactagaacgttctattgccttggccacaatgactggctcagagacaggcacctgatgtcagctgaactcatgagaatcagccccaggactttaactggaactatcaggaaagcgtgcttgactttgcctcctacttacacaaggagagaaagctggcctgggaatgggaggaacgtaggaccaaatatggagccagcacctggatccagccgcacctgaagccagttttagtttcatgcatcaatagagcctattttttttttccccttaaacctgtttgagttgttttctgttacaatagtagaatcgtgactggcagggtatcctccctgcccacccccaaccctggataggacatcaactcttcacagtacctgctgcacttcaccactgtcctggtttgcctggtagaaaagagacagggtgggtgattaggttgacaaagtcgagggtggggaagagaaaaaatggtgaaaggtcaaacaaggccagaggatcttagtctcctgctctgtcagtgcctagctgggtccctctgcaactctgtgtttctgtttctctattgctaacgctacaaggaggcaagataattaacagtaatcacagccgcagatccgtataggaagtgatgcctccatgccaggctctatgtacagggctctcccatgccatgatttcttcaaaatccactttaggaggtaggcattcgtgtaaaccctgtgatatggtttggctgtgtctccacccaaataatatctcaaattgtaattccacctgttgaggaagggacctggtgggaggtgatcgggtcctgggggcggtttcccccatgctgttatcctgatagtgagttctcacgagatctgatggtttaaaagcatttggcagttaccccctgtggctgtctccagccaccatgtggaagggaaagtgccttgcttccccttccgccatgattttaagtttcctgaggcctcccagccatatggaactgtgagtcaattaaacctcttttctttataaattacccagtctcaggtattcttttttttttttttgagacggagtcttgctctgtcgcccaggctggagtgcaatggcgcgatcttggctcactgcaagctccacctcctgggttcacgccattctcctgcctcagcctcctgagtagctgggactacaggtgcccgccaccacgatcggctaattttttttgtatttttcgtagagacaaggtttcaccatgttagccaggatggtctcgatctcctgactttgtgatccacctgccttggtctcccaaagtgctgggattacaggcgtgagccaccgcgcccagcctgatctcaggttttcttttttttttttttttttttgagacggagtctcgctctgtcgcccaggctggagtgcagtggggggatctcggctcactgcaagctccgcctcccgggttcacgccattctcctgcctcagcctccctagtagctgggactacaggcgcccgccactacgcccggctaatttttttgtatttttagtagagacggggtttcaccgttttagccgggatggtctcgatctcctgacctcgtgatccgcccacctcggcctcccaaagtgctgggattacaggcgtgagccaccgcgcccggcctcaggttttctttatagcagtgtgaaaatggggccaggcgtggtggttcacaaatgtaatctcagcactttgggaggctgaggtgggcagatcacctgaggccagcagttggagagcagcctggccaacatggagaaacctcatctctaaaaccttgtactaaaaatacaaaaatcaggccgggcttggtggcttacgcctgtaatcccagcactttggaaggctgaggcgggcggatcacgaggtcaggagatcgagaccatcctggctaacatggtctctactaaaaatacagaaaaaaaattagctgggcgcggtggcgggcgcctgtagtcccagctactcgggaggctgaggcaggagaatggcgtgaacccgggaggcaaagcttacagtgagccgagatagtgccactgcagtctggcctaggtggaagagcgagactcagtctcaaaaaaaaattagctgggtgcagtggcacgtgcctgtaatcccagcgactcaggaggctgaggcacgagaatcccttgaacctgggaggtggaggttgcagtgagccgagatcgtgccactgtactctggtctgggtgacacagtgagactctgtctcaaaaaaaaaaaagaagaaaatggactaatataccctgtctgtagattcgaaaatggaagctcagagaggtaaagtctatcagtgtgcatttgagggcctgcaaccaaggccccttgacattctgaaccttccatgatcctaagcagctgagggaatcgaacagcctgggtctgaatgttgggcacctacatgctgtgagcccttgggaaaatctctgccccctctgagcctcagtatccccatctgtgaagtgggatgataacaggacctccctgggcagggctgttgtgcagcttccctgagatgagttagcactcaaagaacattaaatgatccattgtgttgctttcattggttgtccatgatgtagacagcccgaggctggccactcagtaggtgctgggagatgtgattcttggtggcagaggcctccaaacagagtggtaaaaaccaactgcctaggtgcgaaccttgcctctcccacttcctggctgtgagacttacgtactttttctggttgttttttctcggagacagggtctcactctgtcgcccaggctgcagtgtgatggtgcgatcatagctaactgcagcctcaaactcttggactcaagcgatcttcctgcctcagccccagagtagctgggactacaagtgcgtacccccatacccggccatttaggcccgttttaatctcttagggcctcactttttcccagctgtaaaattgggtttgtattgttcctgtgtgacaaatggctgtgaggattaagagtatggaaaacacctggtatggtgtgtagcgacttctacataaaggtctgctgttgtttttatgattgtttttaagccgtctgtggcagacactgttggttgtataacccaagatccctccttccaggccaggcgcagtggctcacacctgtaagcccagcactttgggaggccaaggcgggtggatcacctgaggtgatgagtttgagaccagcctggccaacatggtgaaaccctatctctactaaaaatacaaaattagccgggcgtggtggcgcatgtctgtaatcccagctactggggaggctgaggcagaagaatcacttgaacccagggggcagagggtgcagtgagcccagatcatgccactgcactccagcctgggtaacagagtgagactcggtctcaaaaaaataaaaacaaaataaagatcccttcttcctccttccccacagaactctgacgcagttcacccttccctggtagcctgtagttcaggggaagtgggcccaggtggaggatggcctctgatcagcctatgccggctgccggaactccattcctccggctgacaactggagtgtggtgggggtctgggcccaggggacacgaggggactttgctggatgcttcaggaaaggtgtacttgctcctgaaaaaggaactcaagccagagaagtctctgtctccttcccctggcacagtcatgtgaggagatgctggactacagcagccatctggaaaccctgatgggaaactgaggaaagatcagtgcagtgaagttgccggtacagagagaaggaaaggacctgggctggggatgctggaagaaccgctaattaatcagccctagggatgccagggtcctgcaacagctcgctatgtgaggtaatgcatgtccacattgttcacgcttgcttatttatttatttagggagtctcgctctgtcgcccaggctggagtgcagtggcgccatctcagctcactgcaacttccgcctcctaggttcaagcgattctcctgcctcagcctcccaagtacctgggattacaggtgtccaccgccatgccgcctaacttttgtatttttagtagagatggggtttcaccatgttgcccaggctggtctcaaactcctgacctcagctgatccaccaacctaggcctcccgagtagctgggattataggcgtgagccaccgtgccagcctgttcaagttctttaaattcggtttcctgttacctgtgtctagagacaccctcgtggccactccccacctactcagggcaccatgctcaccagcagggcccgcactgcctcagtcacagctgccttctcttcctccaggctccggatctgctcctgcagctgcctcagctcctgccatgtcgagatctggggtggatataagagaaaaggagatgaagcagccatcacccctacccttctctctggagcccactggccacctggacctgcggcgcagtgaggcagagatccctacctagccctcagtggccatcctcccctcctcccttcagtactggaatgccctgaggttcagctggccacacagatgcccagaattcagacacactggccgagcatagtggctcataactataatcccagcactttgggaggccaaggtgggtggatcacttgagatcaggagttcaagaccagcctggtcaacatggtgaaaccccatctctactaaaaatacaaaaatcacccaggtgtgatggcaggcacctgtaatcccagctacccaggaggctgaggcacgagaatcgcttgaaaccaggaagcggaggttgcactgagctgagatcgtgccactgcacactccagcctgggcaacaagagtgaaactctgtctcaaacaaaaaaagtctctaaactagcactttaaaaaatcatggctgggtgtggcactttgggaggcctaggtgggaggactgcttgagtgagcccaggagttccagaccagcctgggcaacacaggaagacctgcctctaagaaattttttttttttttttttttctgagacagagtctcactctgtcacccaggctggagtgtagtggcatgatcttggctcattacaacctctgcctcccaggttcaggtgattctcctgccttagcttcctgagtagctgggaccacaggtacgtgccactgcacctggctaagttttgtattttttaatagaggcagggtttcaccatgttggccaggctggtctggaattcccggcctcacgcaatctgcctgccttggcctcccaaagtgctgggattgcaggtgtgagccacagcacccggtctctacaaaaaaactttaaaaaaattagctgggtgacagattgacaccttgtctcaaaaacaaaaaaaattgttacaatgtacataatatgggaggctgaggcaggtggatcatttgagcccaggagttcgagaccagcctgggcaacatggagaaaccctgtctctacaaaaattagctgggcatggtggcacatgcttgtaatcccagctacttgggaggctgaggttggaggattgcttgtgcttgagcctggaagtctcacggagcctgagaggctgccatgagccaagatcatgccactgcactccagcgtgggtgacagagtgagaccttgtctccaaaaaaaaaaaaaatttattatttttttgaggaactgccatacggttttccatggcagccgtaccactttatacacattcccaacagcaatgcacaacgattccgacgtttccacaacacaattcttgccaacacttgtccttttctgttttgtttttaataatagctacttgaggctgggtgtggtggctcacacctgtaatcccagcactttgggaggccgaggcaggtggatcacaaagttaggagttcgagaccagcctggccaagatggtgaaaccctgtctctactaaaaatacaaaaattaattgggggtggaggcgtgcgcctgtaatcccagctactcaggaggccaaggcaggagaattgcttgaacccgggaggtagagattgcagtgagccaagactgcaccactgcactctagcctgggcgacacagcaagactccatctcaaacaaacaaacaaacagctgctcaaatgcacgtctaaactactactttgaaaatgaagagaatagccaggcgcagtggctcatgcctgtaatcccagcactttgggaggccgtggccagtggatcatttgaagttaggagttcgagaccagcctggccaacatggcaaaatccatctctactaaaaatacaaaaattagttgggtgtggtggtgcacaactataaccctagctacttgggagactgaggcacgacgatcacttgaatcaaggaggcggaggttgcagtgaccggagattgtgcgactgcactcaggcctgggcgacagaggaagactcagtcttaaaaaacaaacgaacaaacaacaaaaacacacccctggcccccccccccgcaaaaaaaaaaaacaacaactagcactttacaaatgaaagagaatataattaaagaacaagaatgcatcacacgtggtaagagcaataattgttaatgaaaccggtttcaattttgggtgtgtgtactgggtcaggatgtgaaatgtatttcttactcttggccacaaagtttgaaaaagcctgctaaaggatgtgacgctctaaattatctacatggccatcaaatggaattttccatcctacctccaggcttttgtatattctggtcccctacttgggatactcttcttccctcttccctggtgatttctcaatccacagatctttgtttaatgccacctcctctgagaagtcctcccaggctgtcctccactttgccttcacagcatttaccacagattataatgagtatatctgtctctatgaatttgattactctaggtagtcaaatttaccagaaattgtaattagtatatatgtatagttgtatatgttaaatgtcttttagtggggcatggtggctcacatctgtactcctagcactttgggaggccaaggtgggtggatcacttgaggtcaagagttcgagaccagcctggccaacatggtgaaaccccgtctctactaaaaatacaaaaattatgcagatgtggtggcatgtgcctgtaatcccagctactcgggaggctgaggtgggagaatcacttcaacctgggaggcagaagtcgcagcgcactccagcctgggagacaagagcaaaactccatctcaaaaaaaaaatgtcttttactagactgtgaactcagatcatgagagggcacagcagggtacttaagattgtggagtctgggtgtggtggctcatgcctgtaatctcagcattttgggaggccagggtgggaggatcacttgggcgcaggagttcaagaccagcctgggcaacatagtatgtccctgtctcaacaaaaaatacaaaagtttagccgggcgtggtggtgtctgcctgtagtcccagctacacgggaggctgagtgggaggattatttgagctcaggaattcaaggttccagtgagctataattgtaccactgtactccatcctgccatcctgggcgacagaacaacaccctatctcaaaaaaaaaaaaaaaaaaagtggattctaggccagaaagcacaggttaaaattcccactctgccacttcccagttgcatgacctagcgcaagtgaattagcttctcgaagccttagtttcccctctgataaaatgggagaaataatggcacctacttcatagagttgctgtgaaaattaaacgaggttaaagtgaataaagcacttcaaacaggctgggaggggagtccaagagaggaatgggaagacgtggggaccccactatcgttagcacctcaacacagagatattgtgaacccggtcctaattcccttttataagtgctagcaattttattattattcaccgcatatttgcaacatctagaacaccggaatatagcagttgcaccttaagtatcagtttaatagaaccattcattaatggattcattcattcattcattaactctatttaactgcctgctatgtgtggcggaggtgcacaactctccctacctctctctctaaacgcaagagctccaccacaccccagccctgaccccgtccgattcacacttggctccccattttcctttgtggtcttagggaaaggctggcatgaggttgcagcacggagggcaatgtcacatagcaagttcctaaaggacaggaggtacccagcgagcagtatgaaacaagcgcataatgggtgtccaggacacagtaggcattcttggcacatagtagggcctcagcactcactggacaactggcacataagtgggtgccatgcacaagacgttggctaacttgggaaataactaaaattcctactacaggttcgccccctgccggagggcatcttgcaaacccaattcttccgtaaagcaaacgtctgcgccccccggccggcgcaggcgcactcacgatcgcgggcaggtccgccgagcgcagctcccccttgcggagctccagggcgtgtgcggcctcttctgggcatgcgcagaaccgctctatgtccagctgagggagtgcgctgtagccctcgcgcgcatactcgtacaggaggttccggtttcgtttctctgtagtgaaacttctccttggactatcgttggagatgcagcctccccggggccggaacccccgacgagtcagcaaaggccacaagcgccgcgccatggacgcagccatcttggaccgggaacaaggcggcacttcgtcccgcccactccgcgtttagaccaattgcaaggcagcgaacctgaccgtgacgagccaatcagatcctgaggaaagttgaccgcgatagagtccttcgtcgcccaatcgtcgtctgtgtcccgcctcttcagtgacgcgaggcagaaccagccaatccctgcacggatagcgcccggaagaggctagaagctggattcagcgtgtccgcgacctcacctttaggtcctgtgaggtcggtggaatcctggggtcctccaaatctaccaggccatctccccagtttcccagttcttcctgcgtgcgggcgagagtggttgggccctcgggaacccactcagagcgaggctaaatttacggagggactttctgttagcagcatgagggcctgtggttagacctatagaggtatttcctttgatttaagccagaaagtcctgagagcggatcggggagcatttgcggatcggtcactttttcctcctttctgagtctcttatcccctaccacagggacggcccaggtggcaggatgtcctggtctggccttctccatggcctcaacacgtccctaacttgtggtaagtgggggacttgggcttcagggacgaggctagagggggagggttattcgctcttggacttgtgtgcctccgtcggagccccgagggaaacgggggtggaaaaacacggtggggttttggcagagctagggctgctagagcaagaggtgggaagcagctgcatggagggctactgcgtgtcaagcggcgtttgggtcagttttattatttatttatttaagatctccctctgtcgcccaggctgaagtgcagcggtgtgatcacagctcactgcagtctcgacctcctgggctcaagtgatcctcccgcctcagcctcccaagtagctgggaccacaggcctgcagaaccacaaccagctaactttttgattctttgtagagagggaggtctccctgtgtcgcccagtctggccttaactcctgagctcaagtgaccctccacagcctccaaaagtgctaggattacatgcatgagccactgagcctactattattttaaacagcattaaaaataatgcttcctggccagccgtggtggctcacgcctgtaatcccagcactttgagaggccgaggtcaggagttcgagaccagcctgaccaacatggtgaaaccccgtctctacttaaaaatacgaagattagccgagcgtggtggtgggtgcctgtagtcccagctgctcaggaggctgagacaggagaattgcttgaacccaggaggcagaggttgcagtgggccaagattgaggtactgcactccagcctgggcgacagagtgagactttgtctcaaaaaaaaaaaagaaaaaaaaaaaaaaggtaatgcttccttgaagaataaagagttacttttgtctgtagataacattagatgtgaacaaatgcatctttgtaaagtgctttaaacaatgcctaaaacaccaaaattgagttgctactactctaagatctgttctctgggataataacccctttcggccctctccaggcccagctctggttccccggctctgggctacctgctccatggctaccctgaaccagatgcaccgcctggggccccccaagcggccgcctcggaagctgggccccacggaaggccggccgcagctgaagggtgtggtcctgtgcacgtttacccgcaagccgaagaagcccaactcagccaatcgcaagtgctgtcgagtgcggctcagcactggccgcgaggccgtctgcttcatccctggggagggccacaccctgcaggagcaccagattgtccttgtggagggcggccgcacccaggacctgccaggcgtcaagctcaccgttgtgcgtggcaagtacgactgtggccacgtgcagaagaagtgacggctgggggcacagtgggctgggcgcccctgcagaacatgaaccttccgctcctggctgccacagggtcctccgatgctggcctttgcgcctctagaggcagccactcatggattcaagtcctggctccgcctcttccatcaggaccactattaagccataggagtcctgggggtgcaaagggtgcccctctgtcaacacccttggctcctgtgtttagaggggtggcctgaaggaccttttctgctgggacaagacactgtactgccctctgctgggaaggggttttaataaacagaccctggcgcttgtgatgtaaatccccttgtggagtatttgccctctgtgtggctgtggcagtggacatctctgagcttcagtttcctccagaaaatagctccattggtggtatctcctttgtttggtttggtgaagattaaattcgatgctctatgtgcataacacgcacggagggctcttttttttttttttagacaaagtctcactctgttgcccaggctggagtgcagtggcctgatctcagctcactgcaacctctgccccccgggttcatatgattctcctgcctcagcctcccgagtagctgggattgtaggcacacaccaccaggcctggctaatttttgtatttttagtagagacagcgtttcaccatgttggccaggctggtctcaaactcctgagctcgggtgatctgcccaccttggcctcccaaagtgctgggattacaggcgtgagccaccacgcctggcagagggctactgtattttaagcttaggagtcaggtaggtggcacagaggcccaggtcttcttcctgcaggccatgggttctgggcacataaactctgccctcaagcatggacagctggaaaatggcagtaattgtaatgttgatgtggaaggggtgtggaaaggattcaatggggtgtgctgctccacacccgggagctgttcttttattttatacgtgtgtgtgtgtgtgtgtgtgtgtgtgtgtgtttgtgtgtgtttgtgtagagagagagacagagtctcactgtgttgtccaggctggagtgcggttctatgatcaaagcttacttcagccttgacctcctgagctcaatagatcctcccgcctcagcctcctgagtagtcaggaccacaggtgtgtgccaccacacctggctaacttttccatttttttagagtgggaatctggctttgttgtccaggctggtctcgaactcttggcctcaagagatccttccaccttggcctcctaaaatgctggattataggtgtgagccactattatattatataataatataaaattattactgggttcacctgagctcaaattctgctccccgtcataattgctatgagacctggctatgttggttccccctatgggcctcggtttcctcccttggaaaatggcactgatgataatgctgactgcacctgatcatgtttttggccatgtaagatttaagaagtggggccaggtgcagtggctcatgcctgtaatctcaacactttgggaggccgaggtgggccgaccacttgaggtcaggagtttgagaccagcctggccaacatggtgaaaccctgtctctactaaaaatacaaaaattacccgggcatggtggcatgtgcctataatctcagctactcaggaggctgaggcaggagacttgcttgaacctgggaggtggaggttgcagtgagctgagatcagcaccactgcactgcagcctgggtgacagagtgagactctgtctcaaaaaaagaaaaaagaaaaaacaatgttggaactgtgtttatatcattgggctctggagcccagcactgctccaagccctgcctcccctacttactggctgggtgaccttgggcaggttgtttacactctgagcctggaccaaatggcgctgataagggtgcatgcttgagagctgtttggagcatcatagctgtctccgagttcctcttgacgctcaacacacagcctcctgagggtctcctgattgtaaacatgaggccacaaggtcttttaggatcagagctggtggcagataagtgcactgattacagataaaaattgcccatcccctcatatttggcaccagttttattgagctagtttgttggccatgcctagctgagaaatagagaagtggagggagatggggggatgggagagcttttcctcatggcacactctgctccaggagtctgtatacaggagtgtggagaaaaggaagtgttaccttgcaggaagttgcccccaaagcaagggcaggaggtgggggtgggggacttggcctctgatggaattctggaattctgatgagagaggtgctagcctgacctgaacaggagatgctgacaggcagtgctgggcatgttgcacagagatggctggttacacagccccgtggcaggatcccagagtgccgagaccagctgggtcgtggagaccctaacccagtggcgctagaggaattaaagacacacacccagaaatacagggtgtggagtgggaaatcaggggtctcacagccttcagagctgagagcctcgaacagagatttacacacatatttattgacagcaagccagtgataagcattatttctatagattatagattaactaaaagcatttcttatgggaaataaagggatgtgccaaaataaacggatgggctctggctagttatctgcagcaggaacatgtccttaaggcacagatcgctcatgctattgtttgtggtacaggaacccctttaagccgttttccatcctgggtgagccaggtgttccttgccctcattccagtaaacccacgaccttcagggtgggggtcatggccatcatgaacatgtcacagtgctgcagagattttgtttatggccagttttggggccagtttatggccagattcaggggcctgttcccaacatgtccccttttttgttttgcaaagtgataaaagcaaaggcagctttgtcacggtgagctacttctcacaggagtcaggatccgcatctgcacactatacaaagacaaacaacacagagtaaaagcacaatcatcattgaaatcacagagcctccaagtgtttttatccatttgaatgggttactagctgctaatctgtctgcagctccttcaagcactccagttcctggcattaagttcacgtgtgcctgggatactttaaatatttgttctttcaattttgcaatatccaaatacaagtttgtagagtggccttctagatgcttttttattctttcccaaattttgattttattaagagctattaacagtttccacaaatgcttatgtttagctcctagagcaggccatatcatttgaggctgaggtgccactatactgccatggttccagataataggaactcttgctgtatttcttaccatttctatcatctgaccattttgttcagatgagctgatcacagtgtggccatggcatgcagactgagaggtgcagttcaagctaaacatccccataggtgaccaattaataatgattccataggaattgttgtgcagcacctctgcctgttctgcaaagcaatcttcctaaacaagtacgttcatttttgctaactgggtccaatcctgtttacaaatatgtttttgagggcagtatgcctcaattataggagcagatttattatgagatcagaaagcttgtataactgtgtcatagagtgattacatccaggcattattgccagccaagattgataaatatgcccaataagtataattgtcctctgtgtcagcccttattgaaggaatactcatggcagtggtgatcatcgctatcatagctaccattaaattactcattgcgactggttgtcccactttcctcaggttttcttccaccatctgtgacagcttcttgatctgtctccaggtgggtggctgtgtttgacaggtgttgctcgtgacagttggggtcttcctcagcgtcagtctcgacatggctgcaaccgggggtggggggggtcctcagtttcctcccggaatctcttcctcagcatctggctcatgataaggtttcaggtgtcttgatggtatccaaatcggctgttgagtcagtcctggagaaacacaagcataacctctaccccaagttattattttacctatttcctaactttttgttattggatctctccaccaaactagttgttctgcttctgtctttgcagctggtttctgtagatgctgttcagctactgataggatctggcctttaggcaggctcaaaaaatttaaagttaacaatgctagattcagttgcatatggggtgtcccgtagtccttgttttccccccttttttttgcttttgcaactgctgtttcagggagagattcattctttccactatggcttgtccttgagaattatatgggataccagtaatgtgtttaatattccgtatagagaaaaatgtagctagagctcggctagtgtagcctggggctttatctgttttaatagaagctggaatgcccatcactgcaaaacactgcaaaaggtgacgcctggaagaggtgtatgagccctaatgtgagtgatgtaaaaagggtgcattctactcctaactgctgtttgcagttgggtaaataaaatcatcagttgttcatctgcaggaaattgtaactgagcattttcagttaattgtgtggaatgaatcacgtatgaagagtcagaaatcacattaataggcatatgaaaagcagtcactacctcaattacagctacaggctccactttttgagctgaagtatagggcatctgaaaaactttactttttgagccagaataagaagctttaccattactagacccatctgtaaaaacattttcagcaccttcaattggtttaaatttagttattttagggagaatccaattagttaatttcaaaaattaaaacagttttgtttaggaaaatggttatcgagaatacccacaaagtcagcttaattggtttgccaagtaagactatttataaaagcttgctgtatttgtgcctttgtgagagggataataatttttccaggatcatatccatgtaatttaacaatccgagttctcccatttcctatcatagtagcaatttgatccaaataaggagttagagtccgtgaattagtatgtggaagaaaaagccactctacaagatctcactcttgaacaataacaccagtaggtgaatgctgagttggaaaaattagcaaatctagagtcttctctggatctaatctatttatttgagctttatggacttgcttttcgattagccgcagctctgcctcagcttctcttgttaattaccgagggcttgtgagaccaggatctcctctaaggatagaaaatagattactcatggcataggtaggaatgcctagagcaggtcgtatccaattaatgtcccctagtaatttttgaaagtcctttaatgttttcaattgattcctatgtatggttgctttctgtggcacaatggtagtgtcatttactaaggtccccaagtaggagtaaggagtagtagtctgaattttgtcaggagctataattaaaccagcgcaagaaatcgaattttgtaagtgatcataacattggagtaatacttctcgagtgggggcagcacaaagtatatcatccatataatgaataatgtaacactgtgaaaacttttaacgagtaggttcaattgcttgccctacataagtctggcaaattgttgggctgtttaacatgccttgtggcaatactttccagtgaaaacgcttagcaggctgcaggttgtttactgcaggaattgtaaatgcaaactgttcacagtcttgctcagctaaggggatagtaaagaaacagtcttttaaatctatgactattaaaggccaattttttggaatcatagcaggagaaggcaatcctggctgtaatgtacccatgggttgtataactgaattaatggctcttaagtcagttaacattctccgtttatctgattcttttcttaattacgaaaactggagaattccaaggggaaaatgttggagctatgtgtccgttttctaattattcagtaactaattcctctaaagccttcagtttctctttacttagcggccattgttctatccaaattggcttatctgttaaccattttaaaggtataggttctggaggcttaacaatggccgccatcaaaaataatatcctaaaccttggcggaaacttgtatttctgcttgaagcggttccttcaaaccttgtaaattttttcctagtcccatactagggacataccccatttcatgcatcatatgttgactttgagggctatataattgttctggaattagaacttgtgctccgcattgttgtaataaatatcttccccataaatttataggtacagaagttttggttgaatagtcccaggttgtccatcaggcccttcacaatgcaaaatataactactttgatatacttcaggggctttaccaactccaactatgttaaactgagcaggttgaattggccatgtggacggccattgctatagagaaatgaaatgtccgctcctgtatctaccaaacctttatatttctttccctgaatagttatttcacaggtaggacgtttatcagtaatttgattcacccaataagctgttttgccttgtttatttgtgcttccaaatcctcctgttcgtttaatttcactttttcccattcccacatatggcacattcaggagctgtgctatgcgctctcctggctctgctttccagggaacagaagtagaaaaaacaatttgaatttctccattgtaatctgaatcagtgactcctgtttgtacttgtaccccctttaaatttaaactacacctccctagaagtaatcctattgtccccactggcaagggtccacagacccctgttggaactttttgcgggggttcctcaggcagaaggctcacagcttttgtgcagcataaatctactgtggcattactggctgtggcaggggacagacattgtacaggggtgaaggagtggcctgaggcggaaatgcccctggtttcgaacagggcccgggatgggcccctcatggcatttcccgaaatcgggttcccatctttatcaaacttagagtgacactgattagcccaatgttttcctttttttacattttggacatatatcaggctcagcagttttcttttttcccctgtctgccggcctgacttgctgatttttttctgcattcttttttagtgtgcccatgcttcccacagttgaaacaagctccaggaaatggagtatttcctttatccactttcagtcctgccattgcctgtgccaacaaagtagctttatgcagattacctctgataccatctcaggccttgatataatcaactaaatgtgctttccctctaataggtcacagagcagcctggcaattgagattagcattgtcaaaagctaataaccgcaacactatatcctgagcagccgaatctgcaatcacctttttaagatactcctgtaaccgagctataaaatctgtgtacggttcttttggtccctgttttacagcaccaaaggaagggtactgttctccacctgaagtgattttttcccaagctctgatgcacactcctctaagctgctctatggcatcatcctgcatgaccacctgtgcatctaaaccagcccagccgccgacccccaaaagttggtgtgcagttatatcaatttgaggttgggcctgggtgttgcgaggagcctgaatggaagcttcatctgcccaccaagttttaaattgtaagaactgagcaggagttagacaagctcaagtaagagcgtcccagtcaggaggaatcatccgactggaaacagcaacattctttaacagtcccgttacaaaaggagaacctggtccatattgattaatagcttgtttaaattctttgagtaatttaaaaggaaaaggctcaaatgtagctgtaatatttccctgttgatctgggggatgtattctaacagggaactgccaagcctctaaatcaccctctcttctagcttgctgaattcctgcctgaatggaactgagagcagtcgcttgaggcactgcccaaacagtcactggggcaactacttttcacccagtgtcctctggaaaagaaagatctggagggtcaggtcactctttttcttcacactaaggaggggatgcagaagggtagggatgaacctcttcctcctttgccactttagctttagctggcaaacaaacctgctctgttacctcttccattacttcattacactctccctgctcctcatcagtgtgaaaaggttccaaggtggaatgaaccagaacccacacctgtcccattgctaccctgatgcttccgagctccccttcttactcaccatggggattgcttaagagtactcgggtgtcctccagcttagttccacgttctccaaccgtcgctccagtgactcttcgacctgggttcgagcccccacgtatgggtgccacttgccgagaccagctcggttgtggagaccctaacccagcggtgctagaggaattaaagacacatacacagaaatatagggtgtggagtgggaaatcaggggtctcacggccttcagagctgagagccttgaacagagatttacccacatatttattgacagcaagccagtgataagcattatttctatagattatagattaactaaaaacatttcttacaggaaataaagggatgggctgaaataaagggatgggtctggctagttatctgcagcaggaacatgtcgttaaggcacagatcacttatgctatggtttgtggttcaggaacccctttaagcggttttccgccctgggtgggccaggtgttcctcgccctcgttccagtaaacccacaaccttcagggtgggggtcatggccatcacaaacatgtcacagtgctgcagatattttgtttatggccagttttggggccagtttatggccagatttgggggcctgttcccaacaccagagatttccccaaacagcagatgactttgttagtctcaaggacagactgcctcagcggacctctgctccctgcccacgatcattacccccaaaacatgccggcaagtctctgctccctgcgtcggcagagggatttataagccctctcttataaatcctggtttagcctttgttttgtgactgagtccaccgagatccttgcaggagaagaaaatttgcaggcaaatgaactaaatgtctcttcctgacactccccttctggggggctgaggaagctgtgaacagcctggtttgtcacacagcatgatggccaccacactgaagcagcagcaagcagattcatggaaggtgtgctgagaaccagccacctgggagccctactgtccctgggtatcctctggcttctggctgcaaagctggtctttttttttttttttttcattgatatagggtcttgctttctcacccaggctggagtggtggtgaaatcacggctcactgcagcctcaacctcctggtctcaggcaatcctcccacccaagcctcctgagtagctgggactacaggcggcaccaccatgcctggctaattttttaaaaattatttgtggagacggtttcactatgttgcccaggctggtcttgaactcccgagctccagtgatcctcccacctcggcctcctgaagtgctgggattccacaggtgtgagccactgcacctggctgcaaggctggtcttgactgacaacgtcaggcagtagtccagtcgctaggacagacggatcctgaccctcacactggagtgggtcacaagggcgccatagtgccccacccaggaactcacgtctctcccgtactgctcaaaagatacgtagcggatgcccttgccaaagttggtgaagacgtgggagacctgcagggggaaggggagtgagagggtgagggcctgcgggccccttctcttcctccacttcaacagataggcccaaaggactgaggaggtgccagtcctgcgctagtttgctggggacggagcagtgaataaaaccggaaaaggaccccgccctggtgtcagtgccattctagcagggggcccagacactggagataggtgggggtgaggggccaggggcattctgccaggaaggtggcaggaatgtgagtagagtgagttagcaaaggccccacagaggtgacacctgaaggaggagagggagccgggaggggctctggagggtgtcccaggcagcaggaacggcccgcgcaaaggccctgaggtgggagaatgcctggagctgagtgaggggagaggtaagagaggggtcagggaggtcatgggcagatcatggccttgtgggccacaggaggactttggctttttttttttttccaatttaaaaaagttgagataaaattttcgtaaaacaaactttttatttatttatttatttttgagatggagtctcactctgtcgcccaggctggagtacagtggcatgattttggctcaatgcaacctccacctcgcaggttcaagcgattctcctgtctcagcctcccgagtagctgggattacaggcgcgcaccaccatgcccggctaatttttgtatttttagtagagacgggggttttgccatgttggtcaggctggtcttgaactcctgacctcaggtgatccacccgccatggtcttccaaagtgctgggattacaggtgtgagccactgcgcccagccaaaatttaccattttattttatttatttattttgaggccaagactcgctccatcgcccaggctggagtgcagtggcatgatctcagctcactgcaacctccacctcccccggttcaataaattctcccgcctcagtctccccagaagctgggattacagacgcccatcaccgtgcctggctaatttgtgtatttttagtagagacagggtttcactgtgttggcaggctggtgttgaactcctgccctcaagtgatctgtccgccttgacctcccaaagtgctgagattacaggcatgagccaccacacccggcccaaaattcattttttaaagtgtacaattcagtggtttttagttgattcacgatattatgcagccatcaccactacctaattcccatcaccccaggaaaaaactctgcatccatgagctgtcatttccaagacctccctcccccagcccctggcagtcgccaatcttcttagtgtacatttcatatatgtggaatcatacagtatttgtcatttcatgtctggcctctttcagcatcatgttttcagtttatccacgttgcagtgtgaattcatgcttcatttcttttccgtggctgcataactttggcttttactgtgagatgtagccacaggagcattacaagcagtgagacttctgatctgactcattattattattattattattattatttttagttagcgtctcagtctgttgccctggctggagtgcagtgggaccaactgggctccaaccatcctcccacctcagcctcctgagtagctgagactgcaggtgcaagtcaccatgcccgtctaatttttaatttctttgtagagatggaggtctcgctatattgcccaggctggcctcaaactcctgccctcaagctgtcctcccatcttggcctcctaaagtggtgggattacaggtatgagccactgtgcccagccgaaacatttactttggtaactgaggtgtgaggatcaagacagcatagtcttggtgccagattgggcttgagtccagctctgcactggaccagtcacataacctccctgtctgtgcctctgtttcctcaactctagaatggagataggattttgcttcactgctgcatttccagcacatagagtggtgcccagcacacagtaggtgctcaatcagtgtttgttgaacattaaggggttttgctaatgaaatgaatcgatatgtaagcgtcttgacacagggcttgggatgtaagaagggctcgatacttcttagctgttatgattatagatatccaggagtgacagaagggaaaccgagcagacgagaggctgggcgtgtgtgcctttagcgggtcggggggagctggaagctagtctggacccacctgtcggcagcccctctcagtccactgaaggaccgggtcaggtgaggctgagaacttgaccacttccttttcatacacatccagaaggcggacccggagctggtagacgcagccgcagttctctcgagcgccccacctgccaggcagcagtcagcctctatgcccccgtcacccagccagctctctgggtttcggggcgggaggctgagggctggctccatcttgatgaaggtcctgcacatctggaccacatttggagacgtcctggcctgggaacctctaggggaggagccttggtggttctggggtggaaccagagcctggcggaggagcctgggtggtcctggggaggagccagagcctgggggaggagcctgggtggtcctggggtggagccagagcctgggggaggagcctgggtgaccctggggtggagccagagcctgggggagggtcctgggtggtcctgggggaggagtctgggtggtcctggagtggagccagagcctgggggaggggcctgggtggtcctgggggaggaatctgggtggtcctggggtggagccagagcctcggggaggggcctgggtggtcctgggggaggagtctgggtggtcctggggtggagccagagcaggggaggagcctgggtggtcctgggggaggagcctgggtggtcctggggtggaaccagagcctgggggaggggcctgggtggtcctgggggaggagcctgggtggtcctggggtggaaccagaacctggaggagaagcctgggtgaccctggggtggagccagagcctgggggaggagtctgggtggtcctggggtggagccagagcaggggaggagcctgggtggtcctgggggaggagcctgggtggtcctgcggttgattctggaggcttttgggtaggtagttgggggacgggaaaggatgctctggggaagaaccacaatgcagggcaggtgcctgatgacttcagggaagagccagagccccagggaagagaccagattttctatggaagagccacagcctgaaggaggagctggaatgctttggggcagaacctgggtgttttgggaagaaggcattcatcctaagcctgtaggctctgaagccagtcctgtcccaactatgctccctgagcctcagctcacagggcaccatgctcccaccccttcagagaccctgggcatccacaaggtggtcaggggaggtgtctcgtttcagaggggtatcaagccagtcagtggccccctgtggaccaccccagcctgctgggatgagggtgggcaggagtgcagagtgggggctctggcttctccaaagctctaccttccccggctctgcatcacttcccctctcagcctcatcacaaagggtgcacagtgacagccgctacccgtggggttgatggggcgggaaatgagcccctgttgcagagccgctgccaagcctgctgctgctctggggcagggtgccgctcctcactcaccagtcagccacacagatctcaatctgggcgctgtccagcagctcctgccacaccccttccatcaccaggtccacaagctgcctcttggagcaccatctgggaaggagagatggcagggggcagggcaaacagtcctggcattcaagtcacagtcagaagccacctcctccaagaagtctcccttgataaccctctctaaagcagccctcagggtttgctctagcagacctgaagatgcatgatgggctatacatctctccttggcctcttggagtccctttgccattctccaccctgctgcgggctccaggcagctgacctctatgaaagcctgaccctcatctttgtgggacaggacatgactacaaatgaaggccacatactagacatgtgagcggggagctctgtggcctcctaaagtgtgagggccccgggtctaaagctggacagccttgtctctgtcacccattgcttcctgttggatcagccaatgggatgctccggcaggggatggaagtgaaagaggtgactaaaatcagggtatttatcctcttaggtccttctcaagggactgccttgtcccccaaggaaaaagcaaatctccatggcactctctcctcattttccagtaactgtttcctcccctcacctctagcagtctaggggtggtaacgttcctttcctaactgttactagctcaggggctcctgcctacaactttgtaaacagtccttctcctcaaactagaatgtgccataataacataaattgtgcagtattggtggaaggatgggtaagttgagcaatggaatagaacaaagtgccaggaaccggctgagcgcggtggcttagacctgtaatcccagcactttgagagcccgaggcaggcggatcaccggaggtcgggagttagagacgagcctggtcaatatggtgaaacctcttctctacaaaaaatacaaaaattagccaggcatggtggcgcacctctgtagtcacagctattcgggaggctgaggcaggagaatcattggaacccagggaggcagaggctgcagtgagccaagattgcgccactgcactctagactgggcaacaaaatgagactctatctcaaaaaacaaaaacaaaaacaaaaaaaacagagtgccagggacagacgtaggtatacacagaaacttcataaactgtagaggtggcaccatcattccatggagaacagattctcattttttcttttcttttgagtcaaggtcttattctgttgccaggctggagtgcagtggcatgatcctaggctcactgcaacctcaaactcctgggctcaagagatcctcccacttcggcctcccaaagtgctgggattacagctatgagccaccgtgcccggccttcagtttcctgttataaagtgggggcaataatagtatctatgtcacagggttgttgccagaattatatgtaaagtgtctagtatagagtaactccttgtggaggcaaaagcgactccatcttgggtgctaatctgccatgttccctttttttttttttttgagacagagtctcattctgtcgcccaggctggagtgcagtggtgcaatctcggctcactgcaacatttgcctcctgggttcaagcgattctcctgcctcagcctccacgtccagctaatttttgtctttttagtagagacggggtttccccctgttggccaggctggtctcgcactcctgacctaaagtgatctgcccacctcgggctctcaaagtgctgggattacaggcgagagccaccgtgcccggcccaaaaccctgtctttagatcaaagctgtcttgctgttgtctcacaaactgcaggcgatgatgcacagagcattgctgcctgtggttgctaaccttcctgatctttccttgtatccctggcatatgaaacagtaccctcaacaagtatttgttgattgatggaatgaatcaatgaataaataaatgggggaaggagagggtgaaggtgacgatgaggacagtgtggggggtagggtccctttctttggggcctttgccccagggatcggggcctctcacttgggccactcactcgaaagaggtcacgaagcaggtctgcgaaggagccccaggcaccggtgttaggttcttttctatggcccagccgttcccgccatgctccacctcccagcctctgaagccctctgtgggaaaacaagagttgaacatatggttcacctgccagcctgcccagaagagaccccgcaaccagccagcttgtgctgtccaccagcctctccctcttgtgctccaatcctccctggtttctcctaccgactcctcctcccattattctgtattcctggtcctaccccacaactgtgactctcagcggtgcccatccactcagcttctcttcagccacccttacttgctctttctccttcagtcctgctcttcattgtgtgtgtgagagacagggtctcactctgtcgcccaggctggagtgcagtggctccatcatagctcactgcagcctcaaactcctgggctcaagcgatcctcccacatcagcctccagagtagctaggaccacaggtgcatgccaccacgcctggctaatttaattttttaatttttttttgagatggagtttcaatcttgctgcccaggctggagtgcaatggcatgatctcagcccactgtaacctccgcctcccaggttcaagcaattttcctgcctcagcctcccaagtagctgggattacaggcgtgcaccaccacacctggctaattttgtattttagtagagatggggtttcaccatgttggtcaggctggtcttgaactcctgacctcaagtgatctgccccctcgggcctcccaaagtgctgggattacaggcgtgagccactgcgcctggactaatttttaaattttttagagacagagtctcactttgttgttcaggctggtctcaaactcctggcctcaagcgatcctcccaccatagactcccaaaatgctgggattacaggcgtgagctactgcaccccaccatttttttttttttttgagacaaggtctctgtcacgcaggctgtagtgcaatggcacgatcatagctcactgcagccttgaactccttgggcttaagcgatcctcctgccttggcctcccaaagcgttgccattcccaccgcgcctggcccctgtcctgttctgcatcccctctgcataccaaactacttgctttctcccccggcccagccagggtcttcctgccttgccccgcccactcgttcggattcccggcttcaccttctccagccccgcccaccgggcctaccgcccaggcactgcgtccctcagccccgccccctggctcctccagcggtctcgcccattggctacatctctcagactctgtcccggccccgcccccgcctcgctcgcgcggcccccctcagcctcctgggccccgcccccgtcacccacgctctccgcaggagttgaagatgagattgcggccgaagggcgcgcgcagacagtagcgcgccagggcgcacagcgggaactcctccttgtcttcgttgctgggcaggcagcgttgagccactgcgtagagtgcgcggccctcggcgctgcggtcgcgggccagctgcagcagccacacagtgggcccgtccactatgtcgcgccaggcgcggcacactgggcggcatcgcgtgaccaaggagcgtggcggcacgtggctcagcacctgcaccagcagctccgggggcagcgcgtccagggccagggatgggtccgccggcagccgtcgccgcgatagccgggcgcccatctccagtagccagagtcctgcaggtcgagaggggtcggtaggcgggtcagcgcagccaggccaccccctccctaccttgtcccccagggcgcaaggcccctgctgctcgagagaccccattaggtccatgggcaaccagggacccatttccctctctgatcctaggcctttcccaatcttccccacttgggtaaaagacccctggtctgactctgacccccgtcaggaccgctgatcacggcttccgtctggcgttcaattgtgtcaggctaagcgcttcaggtatatgaccagtgaaatggcaaaagaactaacataactaaccccatttttgtttaaggggactttacccattcctgcacatggctaggttaattttagaccgctgagataatatgcaaaaacagcaatcatgtagtttttaaaactaactctgggattaaagaagtatgtaaacaactatgttttgtcaaagattttttttttttgagacacagtcttgctctgttgcccaggctagagtgtgcagtggcacgatcttggcacattgcaacctccgcttcctgggttcaagcgattctcctgcctcagcctcccgagtagctggaactacaggcgcccgccaccacgcccggctaatttttgtatttttagtagagacggggtttcaccatcttggccaggctggtctcgaactcctgacttcgtgatccacccacttcggcctctcaaagtgctgggattacaggtgtgagccaccacgcccagcctgttttttcaaagatttataggggcattgtgacccaaccaaggacaaagaagtcatcaacctcctcggaccctagctggcactcagatgtctgcagtggtcacctccttatttttattattattacttttttatggagctagaaaccaggactatagcctctacctcctgggctcgagtgatcctcctgcctcagcctcccaagtagctgggactataggtgcatgccactatgcccagctagttttttattttatttattgttttgtagagatggggtctcactacattgccctggctggtcttgaattcctgggttcaagtgatcctcctgcctcagcctcccaaagtgctggaattggtatgagtcactgcgcctggcctgttggtcacctcttgatcacaatgcccttctcttccctctgcccctaaaaaaaaaaaaaattgtactgatttaagatggtactttaggatgatagtccactgtgttctcggtttgctggctctccaaataaacttgcttttcctcccaccaactgtcatctctcttgagtttggctttctatttttttttttttttttgaggcagcctcactctgtcacccaggctggaatgcagtggcccgtctcggctcactgcaacctctgtctcccaggttcaagtgattctcctgcctcagcctcccgagtagctgggactacaggaatgcaccaccacacctggctaatttttgtatctttaaggagagacagtttcaccatgttggccatgctagtctcgaactccagacctcaggtgatccacccacctcggcctcccgaagtgctgggattataggcttgagccaccacgctcggcccgagtttggctttcttttctgaaaccgagtcttactctgttgcccaggctggagtgcagtggcacaatcttggctcactgcgacctccgcctcccgggttcaagcgattctcctgcctcagcctcccaagtagctggaattacagatgtgtgccaccacaccgagccagtaatttctgtagtagagatggggtttcaccatgttagccggctggtctcaaactcctgacctcaagtgatccacctgtctcagcttcccaaaatgctgggatttcaggcgtgagccaccacgcctggcctgagtttggcttttgagtgttgagcggccaaacctcagtcgggttacagacccacaaggaaacccactgcggaagaaaccatttctaccccataccccaatgtgtgccagctactgtgacctttggaacccatgacccatcttcaacaaaatctcttcttgcctcagttacttctctgaacattcctaccaccttcttgctctaactggaacccagctctcctgtgggccttccaagtggggaggtctccgtgctcctgggagctacttcctgaccattctccctccaccctccccaaaacccccagcgatgaatctcatcactaccttgcttcatgcgtcatctgctgacccagatcatgactcctctcttctccctaattttagctctgggctcacggccgctcccgctgctcttagcatcattctcagtgatttctataaccagatagttcttccgcagccccaacctctctgttccctgacctctctctagtgactttttccttccccaacatctccctctcgtggtcaaacccagaccttgtttgaataacagcagcctcttcagaacctcaatctcacactcactctccacccatcactttttctttccacctcattccctccagtgccccactcgcatgatccttccaacccactgtgatctcccatccgttgtccctttcatattttactccccctcaccctcccatgccctcatttcttccttagccagcttaaattccatggttaatcattaaaaacattcttgacctggcacgctggctcatgcctgtaattccagcactttgggagggcaaggtgggaggactgcttgaggccaggagtttgagatcagcctgggcaacacagcgatactccacctgtacaaaaaataaaatgaaaaaattagccgggtgtggtggtgcacacctgtagtcccacctactccagaggttaaggtgggatgatcgctggagcccgggagttggaggctgcagtgagctatgattatgccactgtactccagcctgggcaacaaagcgagaccctgtctctaaataaaataaaaagaatagcaaaaaaagtggggctgtagctagaaggggaggtgaagtcaagagagggtttgggctgggcacggtagctcacacctgtaatcccagcactttgggaggctgaggtgggcagatcacttgaggtcagtagtttgagaccagcctggctaacatagtgaaaccccatctctactaaaaatacaaaaattagctgggtgtggtggcgcacctgtaatcccagctactcgggaggccaaggcaggagaattgcttgaacccaggaggcagaggttgcaatgagctgagatcgcaccactgcactccagcctgggcggcaaagtgagaccctgtctcaaaacaaaacaaaaacaaaaacaaaaaaagagagagggtttgttttgagatgggagacaggatgctgtgtgggctaacaggagatccagtgcatgggggaaactgaatgagcagcagagagaggtgagaaccagggacggtggctggaagtgggcgggaaggtgggagcaggtgatgggacagtcacagcaggagaacgggtgtgggcaagggtgcaggtaggtggtagaggcgggggtggctgtggaagttcacttctcatctcttgcattttctctgcaaaataagaagccaagggagagtgaaagggggggaggaggtgttggaaaggattagaggagaagggaaaaggtgtgaattagttgtctagaagacaggaggaaggaggggatcagagaaatgtcatatggctgccaggcagcattggggtccgcctgagggtcaagttcacagacttgaaattagcctggccagggggctgtgttgttttttagctcactcaagctgtgtgggtgcaggcacggcagagaggaaggctggatttaaccagggtctcatgcaggaggaagccaaagtgggcaagggtgtgtgcagagaatgtgttattttttatttatttacttttttgagatggagtctcgatctgtggcctaggctggagtgcagtggcgcgatttcagctcactgcaacctccacctcctgggttcaagcgattctcctacctcagcctcccaagtagctgggattacaggcctctgccaccacgcctggctaatttttatatttttagtagagacagggtttcaccatgttggccaggctggtctcgaactcccgaactcaggtaatccacctgcctcagcctcccaaagtgctaggattacaggtgtgagccactgcgccgggccgagaatgtgttttttttttttttttttgagacagagtttcactcttgttgcccaggctggagtgcagtggcgcgatctcagctcactgcagccttcacctcccaggtttaagcaattctcctgcctcagcctcctgagtagctgggattataggcgcccgccaccacacctggctaatttttatatttttagtagagacagggtttcaccatgttggccaggctgttctcaaactcctgacctcaggtgatccgcccacctcagcctcccaaggtgttgggattaacaggcgtgagccactgcgcctgccctgacaatgtgttattttattattattattattattattattattattattattattattattatttttgagacggagtcttgctctgttgcccagcctggaatgcagtggtgcgatgtcggctcactgcaagctccgcctcctgggttcacgccattctcctgcctcagcctcccgggtaactgagactacaggcgcccaccaccatgcccagctaatttttttgtatttttagtagagacggggtttcaccatgttagccaggatggtctcgatctcctgacctcatgatccgcccgccttggcctcccaaagtgctgggatcacaggcgtgagccactgcaactggccttttatttttatttttgagacagggtcttgcttcttcactcgggtgggagtgcagtggtgtgatcatggctcactgcagcctcaacctcccaggctcaagtgatcctcccacctcagcctcccaaactgctgggattagaggcatgagtcaccgcatgcagcgtctttgtttctctttgtggtaaaacttctcaaaagagctgtctacccagtattttctgcttccattctttctaaaacattttctttctttctttttttttttttttttgagacagagtctccctctgtcacccagactggagtgcagtggcacaatctcagctcactgcaacctctggctcccaggttcaagtgattctcgtgcctcagcctcctgattagctgggactacaggtgcgtgccaccaggccctgcttatttttgtatcgttagtagagacagggtttcaccatgttgcccaggctggtcttaaactcttgggctcaaaggatcctgctgccttggcctcccaaagtgctgggattataggtgtgagccactgtgctcggctccagctccacttcttgctataaattatatgaccaatggcaagtcacttaatctctttatacctcagtttccctttctgaaaatggggctgctaacggtgcctccatcatagggctgttgtgaggatgaaatgagtattttaaagcacttaggaaaagcccctgtaggctcctaaataagagtgatattaatttaatattagtccaggcatggtggctcacacctgtaatcccagcactttgggaggcttaggtgagcggatcacctgaggtcgggagttcaagaccagcctgggcaacatggcgaaaccccatctctacaaaaaatacaaaaagtagcggagcgtggtggtgggcacctgtaatcccagctactcaggaggctgaggcaggagaatcacttgaacccgggaggtggaggttgcagtgagctgagatcgtgcctctgcactccagcctgggcgatagactgagactctgtctcaaaaaaaaaaaaaaaagatgatgtcaggaatttttgctacattcatggactacttgcctgacacaggcttatttcttttttttaagtaaaaccttaatttgtttaaaaatgacaatagctgacatgaattgagcacttattgggcacatgaagataacaagcattagatcattaaagcctcttaaccaagggcatcctcaaaggagagttttgcccattaaacaagatgatagaattcatgagctgatccagcttaaatgctcagcaccgtggcttaataagggccaataaatgccactaaatgaaaatgtcacagctaaaatagttgctgtcagccaggcacagtggctcatgcctgtaatcccagcattttgggaggcggaggtgggtggatcacttgaggtcaggagttcaagaccagcctggccaacatggtgaaacctgtctctactaaaaatacaaaaattagccaggcatggtggtgggagcctgtaatcccagctactcaggaggctgaggcagcagaatcgcttgaacctgggaggtggaggttgcagtgagccaagatcatgccactgcacacagcgagactctgcctcaaaataaataaataaataaaatagttgctgtcactttttaaaaatgatgtgtcataataatggcaactaacataatttagtgtttcacattaatttttaaaatattaatattaattttcacaggtgtgagccaccatgcccagcctctgacatcatctttattcctaccgcagaaagaatgaagctgtggagacagactttacaaagaccaagctgtgcttttctccaggtggttctgagttgcattaatagttcactgaggcccggcgcttgaacccgcgaggtggaggttgcagcgagcagagatcacatcactcactgcacttcagcctgggtgacagagcgactctgtctcaaaaataaataaataaattccctaggtttataaacaagtctaccagtctgcctggcatgggtgtgatgtgcaccagagtttagtttcctggagttcttcttaggaggagttcttagttcccactcttcttcttttttgtttttttgagacggagtctcactctgtcgcccaggctggagtgcagttgcatgatctcggctcactgcaacctccgcctcccgggttcaagcgattctctgcctcagcctcccgggtagctgggattacaggcacctgccaccacgcctggctaacttttgtatttttagtagagacagggtttcaccatgttggccaggctggtcttgaatgcctgaccttgtgatccgcccgcctaggcctcccaaagtgctgggattacagacttgagccactgcgcccggcagttcctgttcttcttaggagtgtgttcccactggcaaaaggaggatctctggggctaggggtaggcccctcgcccaacaagggcagccagacttcaccaaggagcagagatgttcaagaaatgtactgaatgagccctcagctatccacacaaaccatattaaatgcttgtatggggccccagtgtggtggcttacgcctgtaattccagcactttgggaggtggaggcgggaggattgcttgagcccaggagtccaagaccagcctaggcaacatgacgaaaccctctctctacaaaagaaatacaaaaaaattagtcaggcatagtgtcatgcacctgtagtcccagctacttgggagctgaggggagaaggatcacctgagccagggaggttgaggctgtggtgaatcgtgaaggggccactgtattccagcccaggcaatagagtgagatcctgcctcaaaaaaaaaaaaaaaaaagtttgtggccagtcacagtggctcatgcctgtaatctcagcactttgggagaccaaggtgggtggatcacctgaggttaggggtttgagagcagcctagccaacatggtgaaacccgtctctactaaaaatacaaaattagccaggtgtggtggcatgctcctgtagtcccagctacttgggagactagtgggagaatcccttgaacccaggaggtggagattgtggtaagctgagattgtgccactgcactctagcctgggcaacaagagtgaaactgtctcaaaaaaaaaaaaaaaaaaaaaaggaaagaggaaagaaacacgaaaagtggctcaacagtcaaagacaggcttattttggagaataagcctgagaggggcttctggccaattttgggaaaggttgaaaagtacccactgcaagattgaatgccaactactagctgggtcacaataggacaagtagggcctagtattgcctgcttccagggtttttgggagagtgtgtgtttggaggaaggttactggctgtcagagtgaccggggaatgctattggtactcagctacccaaagggacccaggatgctactacagcagactgtatttttcaaaagtggctatgagaacatttcctatctgacacgctttttcagttcaccactgctcgtgaagctgtggggtccacattcctcccctgggcacgtgcaggcttttgcaactgcctcaactttcagagcactgcagaagggacattgctaagggatttcattctctctctctttctctctctttttaagagacaaagtctcactctgtcgcctggttggagtgtagtggcgtgattatggctcactgaagcctcgaactcctgggctcaagcgatcctcccaactcagcctcctgagtagatgggactgcagacacatgccaccatgcccagcttcgtttgttttatattttttttttctagaagtgaggggtctccctatgttgcccaggctggtctcttcctgggctcaagtgatcctgtcgccttggcctcccaaagtgctgggattataggtaggagccactgtgcccggcctgctaagggatttctgaggctggatcataaaagagtatgcagcctctgcctgtctttctttctttctttctttctttttttttttttgagacagagtcttcctctgttgcccaggctggagtgcaatggcccaatctcggcccactgcaatctccacctcctggattcaagcaattgtcctgcctcagcctccagagtagctgggattacaggcacacgccaccatgcctagctaatttttgtatttttttttttttagtagagacgggatttcaccatgttggccaggctggtctcgaactcttgaccttgtgatcagcccaccttggcctcccaaagtgctgggattcattaggctgtgcaatttgtgcactttctataaaaggtttgctaaaaatgagctgggtaccatggcttatgcatgtcatcccagcactttgggaggctgaggtgggaggatcgcttgaacccgggggttcgagaccagcctgggcaacacagtgaaaccccatctctaaaaaagtaaacattaaaaaattagctggacctggtggtgtacacttgtagtaccacatactcgggaggctgaggtgagaggattgcttgtggccaggagttcaagggtacagtgagctatgattgcactactgcattccagcctgggtgacagagtgagactctgtctccaaaaacaaacaaataaaaaacaccaccaccactaccaaaacagaacacatacccaaaaccctcaacgtttgctaaaaatgatgaaaacaagaaaaacagatatggcagtccatggaaaggaacaaaaagatgtccaaaaactttcctcaaagccatcaaacaaaagatgttactattttaaaatagaagaatctgtgaaaatgattaagagttagcttataagtatctcctcagcagattctcaaattgtatagtttttttgaggccagagacctttttatactgactggaaaattctgcacaaaaaatacctctgtgaatcatgataccagtttgtttttggtctgtccagagtataattttgccagagtatatttataataagccattattccttttttttttttatggctctggggactgggatcagctatgcggtcctcacttagggaacttgtgcctttgccgtcagatggtggatggggctgggtcatctgaggcttcttccatcctagtctagcagctgaagtgaggagacccgaacagctggcgctccttagacatttctctctattttcacctggtctgtccagctactttcggaaacaaaccaaataatatcttttttttgagacagagtctcgctctgtcccccaggctagagtgcagtggcacgatctcggctcactgtaacctccgcctcccagattcaagggattctcctgcctcagcctctcgagtagctgggattacaggtgcgtgccacccacaccggctaatttttgtatttttagtgaagacagggtttcacatgttggccaggctggtcttgaactcctgacctcaggtgaaccacctgcctcggcctcccaaagtgctgggactacaggcatgagcccctgcacccggccactttttttttttttttgatatggagtcttgctctgtcgcccaggctggagtgcaacggcatgatctccgctcactgcaacctccgcctcccaagttcaagcaattctcctgcctcagccttctgagtaactgggatcacaggtgcgcaccaccacgccaggctgattttttgtatttttagtagagacggggtttcactgtgttggccagtctggtctcgaactcctgacctcaagtgatcctcccgccttggcctcctaaagtgttgggattacaggcgtgagccactgcgcatggcccagataatatactttcatcttcaaggttcattgtattgaacgggttttactaacacagcagcagcctcaattaactgtgttcattttataaagtattatttttactttattagttaagttttattaattgtatctgtttaaaatgtagcaattttatttcaattgattttaaatctttttttttttgagatggcgtcttactctgtcacccaggctggagtgcagtagcatgatctcagctcactgcaatctcttcctcccaagttcaagcaatccttccgcctcagcttcccaagtagctgagattacaagcgtgcgccaccacacccagctaatttttatattttcagtagtgatgggatttcacatgttagctaggctggtctcaaactcctgacctcaggtgatccacccaactcggcctcccaaagtgctgcgattacaggtgtgagccaccgctcccagccgatatggaacatttctattgccccaaaaggtttatcccttcccagccaacctccctactcccacccaaagtcaactactattctgttttgttttgttttgtttttgagacgtagtattgctctgtcctccaggctggagtgcaggggcgcgatttcggctcactgcaacctccgccttccgggttcaagagattttttctacttcagcctccggagtagctgggattacaggtgcgcaccaccacacccggctaatttctgtatttttagtagagacagggtttcaccatgttggccaggctggtcttgaactcctgagctcaagtgatccgcctgcgtcggcctcccaaagtgctgggattacaggcgtgagccaccgtgcccggcttctttctgttactataaattcaatttttcttttctataatttcacgtaaatggaatcatatagagtgtcggctatcaacctacgacctcattgttctaagctgcgaaactggagtttggttctagcccacccagggacgctgttaaaaaaaaaaaaaaaaaaaaaagctccgggaacggtggcttacgcctgcctcctgcctggacaagaagagcgaaacttcgtctcaaaaaaaaaaaataaaaaaaaataaataataattggagtttggccctttaaatcttcttcctttgctgactgacatgatgctaagtttttttcagtagagggcgctggagagacgttgtaggaggaaagggtttggcttccagtttccagacttggctcctgcagggcagctactcctgcagcgagcatgcttctccagcctctgactcctacatgcgtgcggtttctttagtgtcaggaagtttctctggcacatggctcctgaaatatggcagtcagcagcacccacctcagctgagacacttccctgtcagctgctctccccaccatcttactgaatggacttctgccgcattctactggtgccgcaccatagggatgcctttgtccttcggtgagccatggccaagactactccagcaaggtcggggtctcagcctggggctctcatctttctcgggctatcttagacttaggaggagtggctgctccttgtatctgctatttctttctttcttttttctttttctttccttttttttttgagatggagtctctctctgtcacccaggctggagtgcagtggcaagatctcggctcaccgcaacctctgcctcctgggttcaaactattctcctgcctcagcctccttgagtagctgggactacaggcacacgccaccacgcccagctactttttgtagtagggacggggtttcaccatgttggccaggatggtctcgatctcttgacctcgtgatccacctgccttgcctcccaaagtgctgggattacaggtgtgagccattgtgcccagtctatttctacattcgttagcattctctttatttcttagtaaccagttcctcttactcaaatcccctatcatagttaacaattctgtatattaaacaatcgctgtttaaattactgtgtggtttgtctcctggttggatcctgactgatacacacagtatgtgtctccttgtgaagaagtcatctgggccaggcacagtggctcatgcctgtaatattccttgagttgtaggcatggcttagggttatttgtcctctccttcagcataatgtccgtgtgattcactcatactttttttttttttttgaggcagggtctcactctgttgcccaggctggagggcagtggcgccatcatagctcactgctgccatgacctcccaggctcaagcaatcctcccatctcagcctcccaagtagctgggaccacaggtgcaccccaccatgcctggctaatttttaaattttttttgagacagggtcttgctatgttgcccaggctagccttgaactcctgggctcagcgatcttcccagcttggcctcccaaattgctgggattacaggcatgagccaccgcgcttggcccatccacttgttgtgtatcaatcagtagtctattcctttttattgctgggtaatagtccactgaacacataatctacaacctgtttatccactcagtatgatggacatttgggttgtttccagcttaggggtattatgaataaggctgctatgaatattcatgtacaagtgtttgtgtggacatatgttttctttgctttttttttttggagacagagtcttgttctatcaccaaggctggagtgcagtggtgcaatctcggctcactgcaacatccacctcccgggttcaagcagttctcctgcctcagcctcccaagtagctgggattacaggtgtgcgccaccacacctagttaatttttgtatttttagtagagacagggtttcaccatgttggccaggctggtctcaaacacctgacctcaagtgatctgcctgcctcggcttcccaaagtgctgggattgtaagagtgagccatcgtgtccagccattttcattgctcttgagtagatacttaggagtagaatttttgagtcacatggcaggtgtatatttaacgttacaagaaaatgcccagcagttttccagcatgattgtgccatctgcattcccaaaaattctatatgcattgcagttgccagcacctggtattggtattgtcaatcttataaaaagtttacacagaatggtttccttttcataccttcaggatactttcctctacccgattctcccttattaatttttgtttgtttgtttgagacggagtctcaccctgtcacccaggctggagtgcagtggcgtgatctcggctcactgcaacctctgcctcccaggttcaagcgattctcctgcctcagcctcccatcccttattaatttttaactattttagccaggcatggtggcttatgcctgtaatcccaacattttgggagaatgaggcagggggattgcttgaggccaggagttccagaccagcctgggcaacatagcaagacctccatctctacaaaatataaaattaaccagacatggttgcaagcgcctgtagtcccagctactcgggaggctgaggtgggaggagtgcttgagctcaggaggtggaggctgcagtgaactatgatcacaccactgtgctccagcctgggtgacagagtgagaccccatttcaaagaaaaaaagaaaagaaaaaaaaattgcatgcagcccctgggaagtgtggatgctgctggtgttactgagtaaagccctccccatctggcatccgggagtgagctcccagcacaaagactgtttttgtccctgctaacatgaacaagtgctgtccacagaacacagagttcacagtcatccatccaacttgaccaagaggccagtgggaaaggactgtatttataacagccccaaatgtcataccagtgacttaaaaacaagcaaacaaaaaaccacagtcacccagcctcttgtttgaaaaagtggcgggatagcaaggaccatcagatgtttaagaaaactagcagcctgaaagagaaacatttaagtaaacaagcagaaggaaagtgaactgaccccagaggaaacagacaattcacaggaccaaaagaacatggaggaaaagaaaaaaccctaactggtacactcaggactggcttcatgggcatgcaacctgtgcgttcacatgtggcccaccctcttttcaatgctccactgtggccatctcaacattctttttcttttcttttttttttttgagatggagtctctctctgtcgcccaggctggagtgcatgacacaatctcagctcactgcaacctccgcctcctgggttcaagtgattctcgtgcctcagcctcctgagtaactgggactacaggcgcccaccaccacatctggctaattttagtatttttatttttatttatttttgagatggagttttgctcttgttgcccaggctggagtgcaacagaatgatctcagctcactgcaatctccacctcctgggttcaagcggttctccagcctcagcctcctgagtagctgggattacaggcacgaaccaccaagccaggctaatttttgtatttttagtagagacgaggtttcgccatgttggccaggctggtcttgaactcctgacctcaggtgatccacccacctcagcctcccaaagtgctgggattacaggcatgagccaccattcccagctaatttttatatttttagtagagacggggtttcaccatgttgggcaggctggtcttgaactcctgaccccaggcaatctgcccacctcagcctctcaaaatgctggaattacaggcatgagccgttgctcccagcctcaacattctttttatttatttatttttatttatttatttattttttgagatggagtcttactctgtcacccaggcaggagtgcagtggcgtgatcttggctcactgcaacctccacttctgggttcaagcgattctcctgtctcagccttccgagtagctgggactacaggtgcgcactaccacgcccggctaatttttgtatttttagttgagacagggtttcaccatgttagtcaggctggtctcgaactcctgacctcaggtgatccacccacctcggcttcccaaagtgctgggattacaggcatgagccaccatgcccggccaacattctcttaaattaaaaattttgtgtgtgtgtgtgtgtgtgtgtgtgtggagatggggtctcactatgttgcccaggttggtctcaaactcctggcctcaaatgattctcccgtctcagcctcccaaagtgctaggattacaggcctcagccaccgagcctggcctcaacattcttaattatttctgaacaagggaccttgcattttcattttgcaatgggccatgcaaattatgtagctagtcctgggaacacttagatttgcaaagatgttctaaacagagtaagaacaggatactataaaaggaagaatgtctacaagaagaaaaagaaatccaaagaaatggattggatgagttactaacagaaaaacgcctctttcaaaatggaaaaattaaagctatgagaaattctaggaaaaacataaaactgtatctgtgttacagctatttgataaagttcacaaaaaaggaatccttttgacctggaggctaggggcattctctttacattggctttacttacgggttttcttgggaaaaagactcttttcaacaaatggtgctgggacaactggaaatctatatgcaaaaagatgaatttagactattacctcataccagaatcaacatgaaattaatcatacatctaaatttaagagttaaaactataaaactttgagaagaaaacaggagaaaatctcatgatcttgtgttaagcagagattttttagatccaacaccaaaaactatgattcataaaagaaaaactggataaattagacattatcataagttaaaacttttgtacttgcacattatatatctgataaagcacttgtgtatagaatatataaataactcataaaactcaatgagataaaccagttaaaaaatggacaaaaggccgggcacagtggctcacgcctgtaatcccagcactttgggaggctgaggcaggtggatcacctgaggtcaggagttcaagaccagcctggccaacatggtgaaaccctgtctctactaaaaatacaaaaaattagcctgtaatcctagctacacaagaggctgaggccggagaatcgcttgaacctgggaggcagaggttgcagtgagctgagatcacgccatcgcactccagcctgggcaacaagagtgaaactccatctcaaaaaaataaaaataaaaaagaaagaaagacaaaagatttgagtagacatttcaccaaagaacatatacaaatgagtaatgagcacatgaaatgatgctccacttcattagtcattaggaaaatgcaatttttttttttttttgagatatggtcttctctgttgctcaggctggagtgcagtggcacgatcttggctcactgcagcctcaacctcctgggctcaagtgagtctcccatttcagcctcccaagtagctgggactacagatgcacccaccaccacattcagctaattgttgaattttctatagagatgggtcttcctatattgcccaggctggtcttgaactcctgggatcaagggatcctccttccttgacctctcaaagtgctgggattatgggcatgagccaccatgcccagctgggaaatgccaattaaattcacaatgagacaccacttcatacccactaccctggctattactcaaactgacgatactgacaggtgtagtcgaggatataaagaaactggaaccctcaggcatcgctggtggggatgtaagatgtacagctaacctggaaaaccattaggcagtttctttaaaagttgaggccaggctcggtggctcatacctgtaatcccagcactttgggagtcctgaggtcaagagttcgagaccagcctggccaacatggtgaaaccctgtctctactaaaaacacaaaaactagccgggtatggtggtaggcgcctgtaatcccagatactcgggaggctaaggcaggagaatcacttgaacctgggaggtggaggttgcagtgagccaagactgtaccactgcactctagcctgggcaacagagcaagactctgtctccaaaaaaaaaagttgaacatggctgggtgcagtggctcatgcctgtaatgtcagcactttgggaggccgaggtaggaggatcccctgagtccaggagttccaggctgcagtgagctatgaatgcgccaccaccctccagcttgggagacagaataagagcctgtctctaaaaaaaaaaaaaaattaaaaaaaaagttaaacataaacttatatgaaacctagcaattctacgactagattatctacccaagagaaatgaaaatacaccttctacctccatgcaaactctcatatgctaatgttcatagcagctttatacatttggaaacactccaaatgtctattagctgatgaatggatatataaaatgtgccatgtccacaaaatagaatatttttaagcagtaaaaaggaataaacatgctatagtatgaataaactccaaagcaatatgctacatgaaagaggccagatgcaaaaggacacatattatatgatgtgcttctatgaaatgaccagaaaagacaaatctttttgatcagaaagtagattagtagttgccttgggctaggctgggaacagagtgactacaaataggcacaagggatattttgggggtgatgaacatgctttgttacggtggtgatggttgcacaactctgtaaagtcactaaaagccacaaagttgtccactttaacagggctgaattttttggtatgtaaattacacctcaaaaaagctgattaaaaaaacacagcaaactttgcaattaaagcatgtagggcttaaatatggaaacagaacagactgtagatgtttccaccttgacaatgtaaaagcaaatgtacagctgggtgcgatggctcacacctgtaatcccagcactttgggaggctaaggtgggatgatcgcttgagcccacgagttcaagacgagcctgggcaacatagtgagacccccgtctctacaaaaaaattagcagggcatggtggcgtgtgtgtgtagtcccagttattagagaggctgaggtgggaggatcgcttgagcccagaagttgaggctacagtgagccaagatcccgccactgcactccagcctgggtgacagagactccatctccaaaaaaaaaaaaaaagaaagaaaagaaaaaagaaaatgagcaaacacaaaacagtgcaatgttactgcaattcactaaaaatactatcaaagagaactcccatacattcctggtggaatccatttggaatcactttggaaaccactgggcttttttttttttttttttttttttttgagactgaatctcactctatcgcccaggctggagtgcagtggcatgatctcgactcactgcaacctccaccttctgggttcaagtgattcttgtgcctcagactcccaggtagctgggattacagctactctgccaccatgctctgctaatttttgtatttttagtagagacagggtttcaccacgttggccaggctggtctcaacctcctgagctcaagtgatcctcctgccttggcttcccgaagtgctgggattataggcatgagccattgtgcctggcccactggacattttttactgaagtaaaaatgaaaatgtgcctgccccatgacccagcaactccaccccagagccagaaaacacatacaagaatattcatggtggtggtgttcctaacagcttcagattggaaaagtcccagatgcctgtccactgtagcacatacaaataagtcattaataagataagatggactactatatagcacaataatacaaatattgcaaatacaaatattataaataatacaaatacaaaataaggaataagccacaagtacccagaacatgaatgattatcaaaagcaaaaaaaaaaaaaaatttttttttgagacagggtctcactgtgttgcccaggctggagtgcatggccacgatcatagctcactgcagcctccaatttctggactaaatcgatcctcctgactcagcctcttctggacctgggaccacaggcacacaccaccatgcctggctaatttttgtgtttttagtagagatggggtttcaccatgttggccaggctggtctagaactcctgacctcaaatgatctgcccacctcagcctcccaaagtgctgggattataggcgtgagccaccacggctggccctttctctcttcgtgtgtgaggatgtcccctctgcaagatgggaaatatgcaggtccacatctgtcatccacaatctacatgttcaaaagctcagaaaaccaacagtttttcccagacccatttggtggcaggagctgacttgagctgtcatgaggttttgtatagtctttagttactcccctgagaatgaacgtgcatttcactgaaggcctattagtgtttgattacacaaatgctcctcagccctactaggggacttatgtaacataccaaatgggctccgtatgacttgcttaatattcaaagtctaggctgggcatggtgactcacgcctataatcccagcactttgggaggtcaaggcaggcagatcacttgaggtcaggagttcgagaccagcctggtcaacatagtgaaacccatctctactaaaatacaaaaatgagctgggtgtggtggtgcatgcctataatcacagctacttgggaggctgaggcaggagaatggcttgaacctgggaggtggaggtggcagtcagccaagatcacaacactgcactccagcctgggtgacaaaggagagtccatctcaaaaaaaaaaaaaaaaaattcaaagtctagactcccaaatgcatctggccccaagagctttggatcagagatgatggacctctaataacccctgcccctcacggttgtagggaaatttcatgagatcagggtctggccctcgacaaatgtttgctgccactgtgaggagttactatgattagcagcaaacacccagctatgggattggaggagtccacgtgggcacctccatatgctgccatcagagactagaagaatgtgggataaggacagacacgcttaggaaaaaacaaggcgaaacacagcaggacaaaaactgaacctctggcacgatcattcgttgaatttgcaaaaggaaaaagaaaataccaagttccaaatctatccctagaaaaatgggtggtgactgggtgctgtggctcacgcttgtaatcccagcactttgagaggccaaggcaggaggatggcttgagcccaagagtttaagaccagcttgggtaacatagtgagacccctgtctctacaaacaaaatttaacaattagccaggcatggtggtgtgcacttgtggtcccagctactcgggaggctgaagtgggaggatcacttgagcccaggaagttgaggctgcagtgagccaagactgtgccactgcactccagcctgggtgagagtgaaaccctgtgccaattaaaaaaaaaaaaagaagaaaagaaaaagggcccagctgcagcagttatgttgacagtgttagtcataggtgaacaggctataatagttaaggagatgccttcacagaatactaacagctactgttaactgagcacttactttgctctaggcatgtgggaattgctttacaaaatctcacagaagcctcaaaccaccccatgaagtaggcacatggggaaactgaggcttggaggatgacagcaacgtgcccaaggtcacccaacaaagaagcaacagagccatgtcaaaagacaaaattacaacaaatttagttatagatctaatgggcttttattcaagattcttgaatggggcagcctccattttacaaaacagactgagacccccactgggtagtaagagaatggtgggttttataagctgggaccaagggaaaagaatgatagaaaaaaacaaacaaaaaaactaggccgggagcagtggctcactcacacctgttatccccagcactctgggaggccaaggcaggtggatcacctgaggtcaggagttcgagaccagcctggccaacatgatgaaaccccatctctactaaaaatataaaaattagctgggtgtggtggcacgcacctgtaatcccagctactcaggaagctgaggcaggagaattgcttgaacccaggaggtcaaggttgcagtgagctgtgattgtgccactgcactgcagcctgggcgacagagtgagaccccatctcaaagaaaaaaaaaaaaaacctgctgggatttgaatcttggtatattggactccatagtttgtgctactgtatacatgtcttctgtctctttctttgtttcaaaataatcttactttattttctcccaatttttactatgaaatttcattctatagacaagttgaaagagtaatcaaatgaacatcactatctgctccatattttgccatatttgcactctctcttttctttttggacagagttttgctcttgtcgcccaggctggggtgcaatggcgcgatctcggctcactgcaagctccacctcctgggttcaagctattctcccgcctcagcctcctaagtagctgggattacaggtacccgccatcatgccctgctaaatttttatttttgtcgagacagggtttcaacatgttggccaggctggtctcgaactcctcagcctcccaaagtgctggcattacaggcataagtcaccggcctggcggccttgatgaactactcttcagtacttcctaatgaatctcctaagattaagggcaacctggccaggcgtggtggctcacgcttgtaattccagcactttgggaggccaacgcgggtggatcacgaggtcaggagttcgagaccaggctgaccaacacggtgaaaccccatctctactaaaaatacaaaaaaattagccaggcgtggtggcacatgcttgtaatcccagctactagggaggctgaggcaggagaatcgcttgaacccaggaggtggaggttgcagtgagccgagattgtgccactgcactccagcctgggcgacagagagagattctgcctcaaaaattcattctgccatcaatacccactccgtgaacaatttcccctgctgtctctagcaggtcttctgtggctgtttcctcctaacaagatccccgtgggggctcaaacaccagtgggggtggcaggtctcactcatctcttttaatctaaaacacttcgttttccattcttctaaaagagattacatacttttattatagaaaaaattaaggcaaacttttctatttgatttctaagccatatgtagaatttgattagaattgaagaaattaatatttacataaatacaaaaatgttattttaaaaatatatctttttgtttgggcgccggtggctcacacctgtaatcccaggacttttgatggccaagacgagcagatggcttgagcccaggagttcgagaccagcctgggtaacacggcaaaaccccgtatccacaaaaaataaaaaaattagtggggtttggtgggggggcgtgcacctgtagccctagttactcaggaggctgaggtgggaggatctcttgagcccaggaggttgaggctgcagtgagccatgattacgacactgtactccagcctgggcaacacagttttgatttgatttgatttgatttgagacagggtctcaaatatatatgtgtatatatatatatacatatatatatatacacatatatatacacacatatatatatgtacatatatagtttttttttttttgagacagagtcttgctcttgtcacccaggctggagtgcaatggcacaatcttggctcactgcaacctccacctccagggttcaagcgattctccttcctcagcctcctgagtagctgggattacaggcgcctaccaccacgcctggctaatttttgtacttttagtagagacggggttcatgttggccaggctggtcttgaattcctgacctcaggtgatccgcccgcctcggcctcccagagtgctgggattacaagcgtgagccaccgcgcacgcccggcctaaaaatatattttttaaaaagaagctccttagccaagccttacaaaaagagagtcaacagatactaggtatatttaatggaacaataaatacaagttaaaaaaattattttatgttagaaaagtagccaatagagaagccgaaagtaatgtcctgactatacagggaggtgattatatagggaggaggaaaaccacggagatgatcaaagttgtctcctatttttagcaagggatccatggacgcgttgtctaaaagttgatgaaataagaaataacaatccaaaaatatgctgtaaagatttggaaatagataccagaggaataaaaagtggaaaaagttaaaaacgaggcaccagcgatcacgagttacttcttgccatttttgaaaagtaatgtagttaacaaaaaaatgtatttggccgacaggggttgggggcggtggtgagggagaggttgttgtttaaaggcgtgttgttttccatgcaaagctctgtcctgtcctacgtgtctgagtgtcgtgtattactggaacatttttaaagaagtattatttattttacaactagactcccataatatttgtctttcaaaatatggagtaaatagacgctgtctaaagttgaagaggcagtatacagagctttcgaacatatcactgaacattgcaaaagtaacttggcagaacaaaatttaaattgagggttggggccgcagcgaaacacataatgtgcccaagttgctaaatcgagaaaccgccctccaaggcttctgattcacagattctgcgaagggactgacggccagaagacagaaaatccagcaacggtaaaaagcggcctggccttccccgggctgttgcgcccacgtgttggtttgcagcgtttggcaggggttttggatggtggcctccgcggacgagcgcagggatggagaggcctgggcgttcgaacacccacgttcaaagcaaagcccttccagatttagggctttctaacgtgcatttgtataactttgggtttaaaggagcctcaggccgagggagggcccgggaaagcgacgctgcgggttatgggactcccagggacccgcccctccgggcagggcctggcgcgggaatccttcccggggcgccccagctgtgggcgagaacgggactgacgcttgggtcccgacctgggtcccctacctgtcccggcgctcacctggcgggctgctcggaggcggcagcggcgggctaagcttccctttcccactttgttctgggaggcagtcgaggggctccccgtgatcggcgtggcccagggggccccgggaccggcggtctgggcggtcggtcctctcccggggcgtggcggctgcagcccggcgccgggggcggcgactctgagatccagcgggcgggggcgggaggccgcccctcctccggctgcggggcccagcgggagcgagggcgggcgggcgggggagcttggagggctgcgtgcagcgagggggaggcccagttgccgcgaggccagcggggagcggggccagccccgcgcccctaggatccggggcccacccctgggagagccacctcctctgggtgtgcgagttccacatccccaagacgcccccgcggggggactggtcctagctccccacccccacccaaattccgtttccttctggtcctggcctcctgcttgcggccgtctccacccctcacatccatgggatcctgcacaggtccacggttggtaaaccgcttagctgtgagcccgacccagggcctgattcgaaacacttggatcaaagtccctggccacagggattttcttgtatttacgttgcttcccagggccagattctcagaagcccggggctgatcttaaattaaatcccttcaccacacgcactctctgtggcaatgacaaacctgtacccttccaccttaggactcccctgtcctccccatccccccagctatagacaactgaattaatccggaggttcagtttcggtcaggctggggccgcgacccattttctccctttacctctgcccttgggtctttgcagtcccttctgatggccctagattgcaccagggacctcaaggtgactgatctcagacaccccagagctagttttctggaagccaggcctcccccacgctggtaaatcattctccaggcccactggctcatatctgccactgtgctaaatgctttgtatgcatgacctcctcatggacgcctctcccgagaaactgaagtccagagatacctggtctgttgcacgtagtccaagtcgctagcttggaggggtcacacagccagagagcctggattccctaaagccccttcccctagaaacctcagccaggccccacagcgccatcgtgaggacggcgtgagactgcgtgtgcagcgcggagcacagtgctggactcagagccaacgctaatttgactactattacattatttgtaacaaccgcctttgaaagcattttctgctgtgggttgtaaaattactgtattattggtagagtttttagcacagatccacacgcagttccttatgtgaaaggcgtaggcctaggtttgttttgcattccggattttggggggtttatttattttattttagttttttgagacggagtctcgctctgttgcccaggctggagtgcagtggctagatcttggctcactgcaagctccacctcccgggctcaagcaattcttgtgcctcagcctcccgagtagctgggattacaggaacgcgccaccacgcctggctaatttttgtatttttagtagagagggggtttggccatgttggccaggctggtctcgaactcttgacctcaggtgatctgcctgtcttggcctcccaaagtactgggattacaagcgtgagctaccacgcctggccgtaagtagccatttcttcatgctgctcaattctctgacatccaggggcttgcatatgtagggacaagaatactaactaatctttgttctttgataaaacattaaacagttgttcctctaagtcttcctcgaaaccagatttccctaatcatttcaacattccttccaaaagccatcgcttaaagccttcccaaatctaatgtcagatgtttgcgattgttgtaaataccttaacaaatagacaaagcaattgtgtgttattataatgattacaaagctaatgcatacttgtgctgacacgtgtcaccagtgtgctgatacccatggacttgagcttgtttctttattgttattattacaaaaagtggaattgtttatttttcatttattgatttatttttgagtcagcgtctggctctgttacccaggctggagtgcagtggcatgatcacagctcactgcagccttgatctcctgggctcaagtgatcctcccacctcagcccctcaagtagctgggactacaggggcacgccaccatgcccggctaatctttgtattttttgtagagatgaggtttcgccatgctgcccaggctggtctcgaactcattagctcaacaatccgcctgccttggcctcccaaaatgctgggattacaggcataagccactgcatctggccttgtttctttattattggtattctagtttttagactcctttcctgcagggagtgtgatttgactcacccaatataaggagccctggtaaccgcctcagacctgctgaggtttcggctttaggtcagagccagtttcaggaaggctgatgattcaggaccggtggagaggcctggggaacctctagcagggcagcccactgaatgcggttgtcactcagagcctgtccatgtgcttggatctgaacaggaagagaggttttatttatggtcttggtcgtgctttccctcggagtcacatttgttcctggtgtctcctcacatggtgcaggctgatgtgcctactttgcagctctttctgctgagcaaggcctgtttctacccaattaaatctaaagccttctatcacaataaaacctcaactgtcattcccatcaaccaagaagaactgaactaggaggccctgacatttgccaatctgatgtgttatcaaatgtttacattggccgggcacggtggctcatgtctgtaatcctagtgctttgggaggcagcaggatcacttgagaccaggagttcaagaccagcctgtgcaacatagtgagacccccatctctacaaaaaatttaaaaattacctggctatgatggtgtgtgactgtggttctagctacttggggggctgaggcaggaggaccgcctgagcctgggaggttaaggctgcagtgagctgtaatggtgccactgtactccagcctgagtgacagagcaagactctatctcaagacaaataaacaggccgggcgcggtggctcacgcctgtaatcccaacactttgggaggccaaggcaggcggatcacctgaggtcaggagtttgagaccagcctggccaacatggcaaaaccccgtctctactaaaaatacaaaaattagctgggtgtggtggcatgtgtctgcagtcccagctactaggagggctgaggcaggaggattgcttgaacccaggaggcggaggttgcactgagctgagattgtgccactgcactctagcctgggcaacacagcaagactctgtctcaaaacaaacaaacaaacaaacgaagtttacatctttgcctatctaagaagtcaaaagaaaacaaaaaaaggtattgccctggtatcttccttcgcatttctcctaagatgaggacattggtcatcttttcatgtgtttaagagctatttgcatttctttctacatagtttgtcattaatcacctttgcccatttttctgcaattactggtcaggtgttgtgttttaaaaatggtgcaatgggccagtgcagtggctcactcctgtaatcccagcactttaggaggccaagtcgggcggatcagaaggtcaggagtttgagactagcctggccaatatagtgaaatcctgtctctactaaaaatacaaaaattagccaggtgtggtggagggcacctgtggttccagctacttgggaggctgaggcaggagaatcacttgaacccaggaggcggaggttgcagtgagctgagatcgtgccactgcactccagcctgggtgacagaacaaaagtttgtctcaaaaataaataaatataaaaaaatacaaatataaatacaaaaattagcctggagtggtggcagatgcctgtaatcccagctacttgggatgttgaggtgtgaagatcacttgaacccaggaggtagaggctgcagtcagctgagattgctccactgcactccagcctaggcgacaaagtgagactccgactcaaaaaaaaaatggtgcaattattgcaaacagtgaaaaatggacggatgtcacatacaaatctaactttccagcctctggagagatggcctacgctatagggcacgtgttctcacagtcccttaccttgtgcagtgcattgcctgggcccatcatccataacgttaatatcctggcttgtggttatctgtggtggtgatagtggcaggaggcagtcaaatcccttggcagataggggtggttccccagtgaaacctcatcttcaagccaaagacagttttaagcctgaaggccaagctgcaagtctcagataaatccacggaccagattgagaacttgtcttcctgtttggtgcactttcctctgattcctccccacccttcatctattttacatgtacctacccttccctaatttttttttcttttctttctttttttgagatggagtctcgctctgttgcccaggctggagtccagtggcatgatcttggttcactgcaacctccgcctcctgggttcaagcaattctcctgcctcagcctcccaagtagctgggattacaggtgcccgctaccacgcctggctcatttttgaatttttaatagagacagggttttaccatgttggccagcctggtctcaaactcctgacctcaggtgatctgcctgccctggcctcccaaagtgctgggattacaggtgtgagccaccacacccagcccgtaattggttttttacactgtcatgcccatctttgaatggtgcctttgttttagcctcttttgcatactcacaaaccaatcagcatgcactcccccattctaagtccataaaagccccagacccagccacactgagggagagaccacctgacttcaggtgggggactaccctcacatcccctctctgctgagagcttttatgtcacttaataataaaaatcttctccacccttctcacccttggattgtaagtgtgatctcattcttcttggacgtgggacaagaacttgggaccctgccgaatgtaggtacaaagaaggcagtagcaccatagctccccacgattggtgcctagcggccaccccatgcaacagaaagcagtggcaagaccaggccagccctggagctacaggccagagtggggcaacataacagaactactaacatgcctcctttcgtcaggctgtggagggactaacagagctgttagcatgctataacaccacctctgggacttcagggtcatgggcttccctgtttgggtgccgccgtgttctccttgtctgaacgccagagtacacagtgggagccgcttgcaacacacctggtccagccacaaaccctacatggagcctgcccctgtgtcagtgcttgcaggggccagtgggaccccacacttgctagttcacacaccccctcccacccaggggctgagtgcaaagtcacggtggctgtgggatccatgccagagtgcaatccagctgtgccctggtgggctgagtgggcagggtgcctcctgcaacaaacctgggaacagtgcaaggccagggcagtggcattgctggccagaggtctctgggcagcaatgtggctgagaaaaatcctgcatcggtggcaactcctgggatgatcctctcgaagcactcagccgggagcctggccctgcagactcctacattatgagcctttagaagacaaaagaaatgcccaaaacaaagcagtccagctttgccttagtgatggctgtcaagggacccagttaatcaattagagatacatctgcactgtgaagatgtgcatagttggagggcagaaagttaaaaattaaaagcttaccagatagagaaaaatctttttttttttttttttcaggcagagtctttctctgtcgcccaggctgtgtgcagtggtgccatctcggctcactgcaacttccgcctcccgagttcaagcaattctcctgcctcagccttctgagtagctgggattacaggcgcccaccaccatgcctggctaatttttgtattattagtagagatggagtttcaccatattggccaggctggtctcaaactcctgaccatgtgatccacctgcctcagcctcccaaagtgttgggattacaggtgtgaaccaccgtgcccggccaggaagatcttctgaacaaaaaaggaaacttgcaaggaatcctcttggaaaatgtagggcacaaaaaatatccatttagatataaatagagacatagagacacaacccctggtagggatagagacaggtacacacacacacagaactgaaggcacacacacacacacacacacacacacacacacacttttttttgttttgttttgagacaaggtcttgctctgttgcccaggctagagtgcagtggcatgatcatggctcatgacagcctcgacctcctgggttcaagtgatcctcccacctcaacctcccaagtagctgggactacaggtgtgcaccaccacacctggcttttttttttttttttggggtaaagatagggtatcaccatgttcccagggctggtctcctgggctcaagcaatccttccgcctcagcttcccaaagtgctgggattacaggcgtgagccacaatacctagacaggcacagactcatagagtaagctccaaaaaaattctcaagccacatgccacctggagagactactgtctgcaagggtgtcacaggaggccgtgtgggggtctgggttgcctcccacctagatactccaggataatcttcttgtctcaaaacctataacttcggccaggtgtggtggctcacacctgtaatttcagcagtttgggaagctggggcaggaggataactttagcttaggaattcgagaccagcctgggcaacgtagggagacctcgtctctaaaaaacaaagatccccccacccaccttaacgtcattatatctgcaaagttatttttgccatataaggaaacattcacaaattccagaggttaggacctggataattttggcagaaggggggattattcagtctaccatacaccatagttatttatttaaattttttttgagacacagtctcactctgttacccagggtggagtgcagtggtgcgatcttggctcattgcaatctccacctcctgggttccagcaattctcctgcctcagcctcccaagtagctgggattataggtgcactctgccacgcctggctaatttttgtatttttagtagagatggggttttactatgttggccaggctggtctcaaactcctgacctcatgtgatccacctgccttggcctcccaaaatgctgggattataggcgtgagctaccatgcctgggctcttttttttttttttttttttttttttttttgagatggagtcttgatctgttgctcaggctggagtgcaatggcatgatcttggctcactgcaacctccatctcccaggttcaagcaattttcttgcctcagcctccctagtagctgggactacagccatgtaccaccacacccagctaatttttttgtatttttagtagagatggggtttcactggtgttggccaggctggtctcctgacctcaagtaatcctcggcctcccaaagtgctgggaatacaggcatcagcaaccacgcctgtcgtcttgctatgttgcccaggctggtcttgaactcctgacctcaagtgatcctcccacctcggcctcccaaggtgctgtgattacaggcatgaaccaccatgtctggctcggaccatagttcttttataataatagtggtcatcattctagtagttgttatctaatcacattttataatcattagttctaaaatattaagtgccaaaataaataaataaaaaagaaaaaaaataaaaataaaataaaatcttaagtgccaggttctgggctaagagatctaggtacagtatcacatctaattcttccagcaactctctggaatagggacctttgctaccctgaagaaacaagtagagacaatagcgctaagaaacagagaagcctaggccgggtgcagtggctcacgcctgtaatcccaacactttgggaggcctaggtgggtagatcacctgaggtcaggagtttgagaccagcctggccaacatgatgaaactccatttctattaaaaatacaaaaaattagccaggcgtggtagcgggtgcctgtaatcccagctacctgggggactgagataggagaatcgaggtaacggttgcagtgagcagagagagtgccactgcactccagcatgggtgacagagcaagactccatctcagaaaaaaaaataaataaagaaatataaaaatacaaaaagttatccaggcatggtggtacatgtctgtaatcccagctacttgggaggctgaggcaggggaatcacttgaacctgggaggtggaggttgcggtgaaccaagatcgcaccattgcactctggcctgggtgacagagcaagactctgtctcaaaaaaagaaattatatatatatatatatatttgtggaatgaatgagtaaattaatatgtgaaagaagctgtggtgttaaaaaatattttaaacaaaaacgatggccggacacggtggctgacgcgttgaatcccagcactttgggaggctgaggtgggtggatcactcaaaatacaaaaatttacccgtctctactaaaaatgcaaaaattagcctggcgtggtggcacatgcctgtaaccccaggtactcgggaggctgaggcaggagaatcgcttcaaccgggcaggcagaggttgcagtgagccgagatcgtgccgctgcactccagcctggatgacagagtgagactccatctcaaaacaaaaaaaaaacctcggtgaagtctggtctgaccccggagcccttaatcaccaccccaggataccccattcacaagcacaagaaacacagttacactcagatgcccccttctctgggcagaggtttcctaagactttgtatatattaagttttgttaattgcacctcactgaaaggtgttggccctctgtgctctccgcctgccatgattctgggattttggtcctccctggcatcgaccctgctgaatccagacagtagagactggggagttgcttgttggtgtcaggggatctctgaaaaccatgggctcaggtcgtgactttgcaaataatacttcccgggggaacactgggcatagcattttttttctttttttgagacagagtcttgctctgtggcccagactagagctcagtggcataatcatagctcactgcagcctcaacctctttggctcaagtgattctctcctctcagcctcccgagcagctgagactacaggcatgtaccacggagcctggataatgttttgtttattttttgtagagacgagttctcactaggttgcccaggctggtcttaaactcctggcctcaactgatccttctgtcttggcctcccaaagtgttgggattccaggtgtgagcctgggcatagattttttataagtcagtgtttgccagatgtcaaatatttgtgctgtggcctgaatgtttgtgtctacccaaatttctgtgttgaaagctaatccacagtgtgatggtattaaaaggtgggatcttcaggaggtaattagcacttgagggtgggcccctcattaatgggattagtgcccttgtaagggattgaagagaccagagttctcgccttctgccacttgaggacagagtccaaaggcaccatgggctgggcactgaggctcatgcctgtaatcccagcactttgggaagctgaagagggagcattgtttgagcccaggagttcaagaccagcctgggtaacagtgtgaaaccccatctctacaaaaaatataaaaactagccaggtgtgatggtgggtgccagtagtcccagctactcaggaggctgaagtgggaggatcgcttgagcccgggaagttaaggctgcagtgagctgagatcgtgccactgcaccccagcctgggggacagagcaagaccctgtgtcaaaaaaacaaaaacaaaaacaaaccaaaaaaacccaccatctatgaaccagagaatgtgccctcaccagacaccaaatctactggtgctttggtcttggacttcccagcatccagaacggtgagaaatacatttctgttgtttattgaaatacccagcttatggtattttgctacagcagtccaaagggactaagacagtttgtaagtggatctcctttgaagatccaggctcaaaaagaaaggcagccagtggctttggtctagctggccagctgggtcaccagggacctgtgcattcccagaggggctagcccatgggaagaggatttgaaaagaaatgtgagaatcttgcttcacagacaatatttccctgggggagagaaagagaagagcatgtttacatgaccagtttcatgtgtattagtggtgggttgccctaccactagaaatacacattcctaggagagaatgtaaatttccttccttccttccttcctccttccttccttctttccttccttccatccttctttcctcccttcctccctcccttcctccctcccttcttttctttctttccttctttctctctttccttctttctctctcctactttcttatttctttctttttgagatagggtcttgctctgttgcccaggctggagtgtaatggtgcaattatgattatgatctttcttttcttttccctctctttcttccttccttcctttccttccttcctttccttctttccttcccttccttcccttcctttttttttgagacggagtctcgctctgttgcccaggctggagtgcagtggtgtggtcttggctcactgcaacctctgcctcccgggttcaagcaattctcctgcctcagcctcccgagtagctgggattacaggtgctcatcaccacgcccggctaaattttttttttttgagatggagtctcactctgttgcccaggctggagtacagtggcatgatcttggctcactgcaagctctgccttccaggttcccgccattctcctgcctcagcctcccgagtagctgggactacaggcacccaccaccacgcctggctaatttttgtatttttagtagagacggggtttcactgtgttagccaggatggtctcgatctcctgaccttgtgatccacccgcctcagcctcccaaagtgctgggattacaggcgtgagccaccgcgcccggccaattttttgtgttttttgtagagacagggtttcaccgtgttggtcaggctggtcttgaactcctgacctcatgatcagcccatcttggcctcccaaagtgctgagattacaggcatgagccactgtgcctggcccaaatttttttatacattgcaaatacttaaaacaccaaatagcccagatgattctttttttttttttttttttttgagatggagtcttgctctgtcgcccaggctggagtacagtagtgcaatcttggctcactgcaacctccatcgcctgggttcaaacgattcttctgcctcagccccccaagtagttgggattacaggtgcacaccaccactcctggctagtttttatatttatagtagagatggggtttctccatgctggccaggctggtcttgaactcctgacctcaggcaatccactcgcctcagcctcccaaagtgctaggattacaggcttgagccaacgtgcctggcctgatgattcttaaatataatataaaagtcttaattctggggctttgatttccttcatctctgtattcaattttaaggcttcgtggctgaacatgaaaagacacataagaaaacaattttattggccaggcacagtggctcacgcctgtaatcctagtactttgggaggccaaagtgggagaatcactggaagccagaagtttgaaatcagcctgggcaacaaagcaagaccctatctctgttcttatttgttattattttatttatttatttattttttgagatggagtcttgctgtgttgcccaggctggagtgtgcagtgcagtggcgtgatctcaactcactgcaacctctgcctcccgggttcaagtgattctcctgcctcagcctctggagtagctgggattacaggcacctgccatgacgcccagctaatttttttgtgtatttttagtagagatggggtttcaccatgtgggccaggctggtcttgaactcctgacctcaaatgatccatctgccttggcctcccaaagtgctggaatcacaggcgtgagccaccacgcccggcctcttatttattattgttttttgtggtggggacagggtctcactctgcagcccaggctgaagtgcagtggtgcaatcatggctcagtgcagcctcagcctcctgggctcaagtgatcttcctgctttcgccttccgaacagctgggactacaggtgcgtgccaccacatccagtcaatttttctattttttgtagagacagggttttgccatgttgcccaggctggtctagaactcctgacctcaagtggtccacccaccttggcctcccaaagtgctgggattacaggtgtgagccacctcctgtctcacctcacaggagtgctggcctcctgtctctattcctaaaaaaaaaaaaaaaaaaaaaaaaaaaaagaaagaaagagaaaagataacaattttgctagctaggtgagattaattcttggccagataatttattattgggaagggagttctgactttctagttacggaaaaaaaaccttagcctggcatggtggctcacacctgtaagcccagcactttgggaggctgaggcaggaggatcactggagcccaggagtttgagaccagcctggacaacctagggagacccccgtctctacaaaaaatttaaaaaattagatgggcatggtggcatgcacccatggtcccagctacgtgggaggctgaggtgggagaatcgcttgagcccaggaggtcaaggctgcagtgaggtgtgtttgcaccatagcactataacctgggcaacagagcgagaccctgtctcaaaacaaaacaaaacaaaacaaccttttcaaaaatgctgctgagcccttctaaaattgttaccataacaaatgggcttcatgggctacaaaggtttggtcctctggccttcagtctgggttcatggtgtaccatcagctcactttcctaaccagtgacattagagggaagtctgtagctacccaggtggctcgcggctggactggcatcagccggtctctctgtcgcccagctctattctgcattctttctgcattccatctcaccgtctggcctggccacggcccctgagagtagttacatgatgcctggcaggccgatgatattgcctgtcaccccttcggccagctttcctcctggccaggctgatgttggggttgtgacccagagatgaacaggcaggtctcagggggccccttggggaggctgtagattgttcctgggagggatcagctctcataatgtcaacagagtgcaagggggatgcaactcatctgtcatctaccagcccaggggcggcaccgtgtgtggctgccaggctcagcttacaaacctcagagtctggagacctggaggaggggaggcgaggagcccatgttgggggagatcaaataacaggctctgggcaggctggagggggacagagggaggaggctggccaagcaatctccaagcccagccctgccaccagtcaatccacagatgagcgcctactgcatgcagccctccctccctccctctctccctccctccctctctccctccctctctctctttctccttctttctttccttctttcttgctttctttctttctttctttctttctttcctttcttttttctctctctctttctctctctttctttctttctctctctgtctctctctctctttctttctttctttctttcttcctttctttcagacagggtctcactctgttgcccaggctggagtgcagtggtgccatcatagctcactgcagcctccaacgcctacactcaagcattcctactgcctcagcctcctaagtaactgggattacaggtgcacaccaccacactcagctaatttttttatttttatttttttaatagagacagagtttcactatgttgcccaggctggtcttgaactcccgggctcaagtgatcctcctgcctcagcctcccagagtgctgggattacaggtgtttgccaccacgcccagcctaacacctgttatgtgcagtgcgctctcttagggttctgctgtctcgaaggtggaggagtgataacccagctgcgggatgatcctgtctgagggatgatggcagaagtcaggcgtgttctgaatgtcctttgaaggaaagataaaaggatttgctgctggactggatttggtgtgagaaatggggagagacaggagtccaggacaaggccaggctcttgggtctggcagctggtgaaataagagtgccgctccctgaagatggcgtgcggaatctgaataggttcagaaggttgcaaaatctttctgggtatgtgctatgaacttcaaggccaatgtttctctacattttgtaaccatagtctgagtaagaaatgcattctggccgggtgcggtggctcacacctgtactcccagcactttgggaggccgaggtgggtggatcacctgaggttaggagttcaagaccagcctggccaacatggtgagaccctgtctctacaaaaatacaaaaattagacaggtgtggtggcgggcgactgtaatcctagctactcgggagggtgaggcaggacaattgtttgaacctgggaggcagagattgcagtgagctgagattgtgccattgcactccagcctgggtgagagagtaagattccatctaaaaaaaaaaaaaaaagaaatgtattttacacaacaatcaatacacctgaaagtagaatttctgcagcaatgtttacccgttgctgtgtgcagtgcactctgatgttttctattgaatttcattttttaaaaattgtgctggttgtgacttttatccgttggtcatgatctaaaaattgaaaattatcattctaggttctacctcttcaagacttagcttgagttctttactgccctggagaagtctgggagtgtggccgggtgaccacggggcagccagagcctggcagggatgactggaaggaggggagctaagactttgcagtgttcctccagggatgatgatgtaatcatggaagggctcaaagcctttcccaaggacagggtcaaggctactaagtccaagtagcagggacaggcacagcccggccagtaagggtgtgtggcccggggctggtgcctcccttactccctggtcctgcagaggacgcctgggatctgcagcactgtggcaatgacatgttggggagaagggaccctcgcaggctcccagacctgctttgtgacttactgagtgagtgcccgacccctgcctcaccagccctgggcttcagagcctgagaatgaaacccgcccttcttccacctcctctcctgcccatctccttccctccttcctcttcccagctggtgccacgaggagctggcggacctccaagagaattggccaagaatgcagcctctggacagtgacctgggtgagaatcatcacagtggctcaccccggacccaggaatttcacttagtccttgtcatcatccaccaatgcgggacagctcggcccagattgttcatggctcaagacccccaccccaccccattctgcttggttgggctgtgttgtttattttatttaatgaattaatttatttatttgaaacagaatcttgctctgttgcccaggctggagtgcaatggcacgatctcagttcactgcaacctctgtctcccgggttcaactgattctccttgccatggtcccctaagtagctaggattacaggtgcctgccaccacacccggctacttttcatgtttttagtagagacagggtttcattgtgttggctgggcaggtcttgaactcctgacctcagctgatctgcctgtctcagcctcccaaagtgctgggattacaggcatgagccaccatgcccggccgcactgtgctgtttttaagcctcttgaatatcatcacctctctttgtttacagatggggaaacagtttacagacggggaaacaggctcagagggaaaaaataccttttcagggttttccaggcaaagagtggcagagcagagaccaacctccgcctggccaaagcccttctctgcttcctgtccatttgtgggtgatctggtggtttctccttttctttctttctctctctctctctttcctttctgacagagtcttgctttgtcgcccaggctggagtgcaatggtgtcatctcggctcactgcaacctctacctcacgggttcaagcgattctcccacctcagcctcccaggtagctgggactacaggcgtgtaccaccacaccttgcttttttttttttttttttttttgtatttttagtagagacggggtttcaccatgttggccaggctggtttcgcactcctgacctcaagtgatctgcccaccttggcctcccaaagtgctgggattataggcatgagccactgctcccggccagatctggtggggtttttttgagacacagccagatcttcacagtgccaggtggggtgatgtgcaggactgcagctgtgtctggattctggacaaggctccaaatgatcaccaccatatcttggctgttcagttaggtgggtctgggctagagatgagaaaggaggggtgagggaggaggagaggaatctgagcctcagatctgaggctgcaggcctctctgcatcatctcctcttccacatggtacccacttttgggaaaggcatccggatgtgtgcattgaacagtatacaagggcctgtggtcctgggacaatattttaacacaggctttattattatttgggtatagtaaaaccaagagatcctgagatgacagttattaggaaggttgttgtacttacaaattccaagaggaggggacatgccatactatggagaccacacagggactcaccagggtaggtcaggaggcagagggaacacagggagctctgggcaagaggctttattgtgggcaagatggggacacacagtaaaagcttacttctcattcctgttattgcccaggctgcctgggcagatgctctactccacgcagtcatttagggatccaggctatttccatctagtggccccaccatcctcccaggcctcataatattccactggatcagtccagcaggtgagagggatgagggcatggagagttatgggggagatatttgtgggtcagccccagaaacgtaacacgtcactcctgcccacattctctactgaactgcagaggaggcttggaagtgtagtcaggctctgtgtgcccagaaggaaaacaagacagggcttgatgaacacagatcccagtctctgcattgagagcatttcccagaagccaccgtaagggcttctccttttgagtcacggatcagagctgagtcacatgcacactggcaagaggaaccaggatcaccctgatatctaaaccatcaggatttccttccagacttgggaatgggaggagatgccaacaaactcaaggctgtattagacaggaagtggggatggctaatggataggtgacagacagtttcagccccttcttctcacagctccctgccatttctcctcaccactccacaatccccatccttttttttttttgagacggatttttgctcttgtcacccagactggagtgcaatggcgtgatctcagctcactgcaacctctgtctcccgggttcaagcgattctcttgcctcagcctcctgagtagctgggactataggcacatgccatcacgcctggctaatttttgtatttttagtagagacatggcagcaggcaagagagaaatgagaaccaagtgaaaggggtcccccgttataaaatcatcagatcttggccaggcgcgatggctcatgcctgtattcccagcactttgggagactgaagcaggcagatcacctgaggttgggagttcgagaccagcctggccaacatggagaaaccccgtctctactaaaaatacaaaaattagctaagtgtggtggtgcacgcctgtagtcccagctacttgggaggctgaggcaggagaatcacttgaatctgggaggcagaggttgcagtgagctgagatcacaccattgtactccagcctgggcaacaaagccagctcaagaaaaaaaaaatcagatcttgtgagacttatttactaccatgagaacagtatgggtgaatccgcctccatgattcaattatcccccccaagtccttcctataacacgtgagaattataggagctacaattcaagatgagatttgggtggggacacagcctaataatatcaccccctccctcactaacctccattagttcttcttccctgagggttgaacagaaaccagccttttgtgttttgttttttatttgttagtttgtttttgagacagtctcgctctgttgccaggctggagggcagtggcatgatatcagctcactgcaacctccgcctcctgggttcaagcgattctcctgcctcagcctcccgagtagctgggactacaggtgcgtacgaccatgcccagctaatttttgtatttttagtagagacggggtttcaccatgttggtcaggatggtctcgatctcttgacctcaaatgatccgttcacctctgcctcccaaagtgctgggattataggcatgagccaccatgcccagccaaaccagcctttttgaaaggctcattccactgttgatatcaaccaattgcccgatgctacctgttttgtgattttgacacaactgaccagcattccttcgtgataagatactatcagtcacagagtggttctggccagtctacagagtttgcacactgagggccctcatgacctcggcttcgccttttgtttttgtttgtttgttttttgagagagtcttactctgtctcccaggctggggtgcagtgcagtggtgggatctcggctcactgcaatctccgccttccaggttcaagcgattctccttcttcagcctccccagtagctgggattacagacacctgccaccatgcctggctaatttttgtatttttagtaaagacggggtttcgtcatattggccaggctggtcttgaactcctgacctcaagtgatctgcctgacttagcctcccaaagtgctggaattacaggtgtgagccactgcacccaaccctctgcttcaccttttgatgtatagggcctaattgtaatgtgtttaaatgttaaattgtaatacatttaaatattcaccccagatgaacatgggatgcatgtgcatatgttggcctactatgcatgcacacgtttcccctttgtgaatattcatagctcctcctgtaacctgttgaatatatatatttggccaccccattcagcataaacccctgtcttcatcttcccaccttcaaagtgcctgtttttggcttctggccagaggctacacttctgagcttgtcagaatagaccacctgcaggctgcaaccccttatgagaaataaagctctcctttccaagtgtatgaacctcatcattcttcagctgacacagctaaatttcagggaacactacaactaaagggaagaagggaagaaaggctgtggggatgctgcttagtttctaccatgacatgatggcaggcacagtgctaagcttgctcatgtatctttttttttgagacagagtctcactctgtcacccaggctggattgcagtggcacaatctcagctcactgcaacctccacctctcaggttcaagcaattctcatgcctcagcctcttgagtagctgggactacaggcacccgtcaccacacctggctaattttttgtattttaagtagaggcagggttttgccatgttgcccaggctggtctcgaactcctgagctcaggcaatctgcccgccttggcctcccaaagtgctaggattacaggcatgaaccactgcacctggctgctcatgtatcgtttaattgaacctcccgcaatcctatgaggatgctggatcagggaaaaggactttggttacaagcagcaggaagtccagttaacattggggcctgctaatacaagggtacttattgtttatttaacaagcactcttgagataagctatcttgggatcttggggttggtctagcagctcagttatgtcttcagggagccagcctgcttctcttcctttccatcaccctcagcatgttggtgtttgtcttagaggttggcagcctcagcggctgggaccataacttcacacacaaaggcaggaagacataggaagggaagggcgcccagcacacttcccctgatgccttcttgagcagaactgggtcaaagggctacctttagctgcaaaggaggctgtgaaagcaaacatccagcaaaggggaacaagctagccacatctggtgtattcttttttttttttttttttttgagatggagtctcgctctattgcccaggttggagtgcaatggcacgatctcatctcactgcaaactccgcctcctgggttcaagcaattcttttgcctcagcctctcaagtagctgggattacagatacccaccaccatgcccagctaattttttgtatttttagtagagacaggattttgccatgttggccaggctggtcttgaactcctgacttcaggtgatctacccgcctcggcctcccaaagtgctgggattacaggcgtgagccactgtgcccagctacgtctggtgtattctaattcatcatccacggctgggcacatggctgcaccaaaaaaaaaaaaaaaagaaaaaaatagctaggttctgttagccaggaagtgggggatggcctgcaagtaacagaatctgccacagtaggaacaaggtgacatctacaatgtttaataatggcatggtatggcggtggccatcattgctgacataggctggggcacctgattagggtctcagacactcccttgtgtgcccctttgattatggagagacaaggaaactccaaagaaggagcaaaagaaaggagggcacttggcagtgaacactcaacaagcagtgtagaagattttaacatttactgcaatcccagcactttgggaggctgaggcgggaggatcacttgaggtcaggagttcgagaccagcctggtcaacatggggaaacctcatctttactaaaaaaaaaatacaaaaattagctgggcatggtggcacgcacctataatccttactacttggaaggctgaggtgggagaattggttgaatccgggaggtggaggttgtagtgagctgagatcgtgctgctgcactccagcctgggcaacagagcgagactccgtctcaaaacaaaacaaaacaaaattaacatttaaatgacctgttcggctgatagagagttcccactccagacccccatgaaggcaatcaagagccctctggttgctctgtggccccctaggaatgttcataaaggcagaacatcactgtctcagtctgtttgtgctgctgtgacaacatatctatgactgggtaatttacaaaaaacagaaatttattttctcactgttctggaggctgggaagtgcaaaatcaaggtgccagaagattcagtttctggtgaagatcactctcagcttccaagataacagctcattttttttttttttttttttttttgagataggatcttgctctgtcacccaggctggagtgcagtggtgcaatcatggttcactgcagccttgaactcctgggctcaagagatcctcccctggccaggcacggtggctcacacctgtgattctagaactttgggaggccaaggcaggcagattgcctgagctcaggagttcgagatcaggctgggcaacatggtgaaacctcgtctctactaaaaatacaaaaattagccaggtatggtggtgcatgcctgtaatcccagcttactctggaggctggggcaggagaattgcttgaacccaggagacagaggttgcagggagctgatattgcaccactgtactccagcctgggtgacagagcgagactctgtctccaaaaaaaaaggtcctcccatctcagccacctgagtagctaggactacaggtgcatgccactgggcccgactagttttttaatattttgtagagacgggggtctcactatgttgtccaggatggtctcaaactcctggactctagtgatcctcccgcctcagcctcccaaagtgctgggactacaggtgtgaaccaccatgcccagccaataaaaaccacaagaatctaatagtcatcccctgggccagaccttgttctaagcacattgcacatattaatatgcagcttgtgcaggtatatacggttatattatatgggtaggtagaatatataatatatatagaataataagtagatactttattggcactattatgtagaggagaaaggtcttagaaattaagcagtttgtagccacgcgcagtggctcacgcctgtaatcccaacactttgggaggccgaggagggcggatcactagaggtcaggagatcgagaccagcctggccaacatagtgaaacgctatctctactaaaaatacaaaaattagccaggcgtggtggctggcgccgtaatcccagctactcgggaggctgaggcaggagaatcacttgaacccaggagacagagtttgcagtgagccgagattgcaccactgctctctagcctgggcgacagggcaagactccgactcaaaacaaaacaaaaaaaataagtggtttgcctaaagcagtggttttcagttgggaatgatttttccccctggggatatttggcagtatctggacacattttttggctctcacaactgagaagcaggggtgctattggcatctagtgagatgaggccagaaatgctgctagacattttccaattcccagggtgggcccttccagccagaattatccagccccaaatgtcaccagtaccaagaatgagaaactctgccctacagacattgctgcccatggcccctggaggaaggtagataatgttcacagcaacatgggtgagaaatagtccccaaactgggggcactagcacactaaggacacaatgacacatagattgtagtccactcccatattggacaaaattgatgaacagtagttatcttcatcaaaatggatgaatctcatattaatgttgaatgaaagatgcaggtcacagaagaatccaggtggtatgctttcatttgtatcatttatatcatttatatcaaacacaggccaggcacggtggctcatgcctgtcatcccagcacttggggcggccaaggtgtgtggatcacttgaggtcaggggtttgagaccaggcgtggtgaaaccccatctctactaaaaatacaaaaattagcaggacgtggtggcggacacctgtagttccagctactcggaaggctgaggcaggagaatcgcttaaatccagcagacagaggttacagtgagccaagatcacgccactgcactccagcttgggcaacagagtgagattccatctcaaaaagaaacaacaacaacaacaaaaaaactacacacacgcacacacactcacacacacgatagatggccaaacactaaaaaaaaagcctgcaagagattattacaaaaaattaggatattgccaagcatagtggctttcacctgtaatcttagtgacttgggaggctgaggtgggaggccagaagtttgagaccagcctgggaaacatagtgagaccccatttctgcagacaaaaaataaaaagttagttaggcatggtggtccacacttgtagtcccagctacttgggatgttgaggtgagaggatcgcttgagcccaggagtttgaggctgcggtgagccatgattgcatcactgcactccagcctggaaaacagagtgaggcctcccactctaaaaaaacaaatcaggccaggcgtggtggttcaagcctataattccagcactttgggaggtcgaggtggccagatcacttgaggtcaggagttcgagaccagcctggccaacatgatgagactccatctctactaaaaatacaaagaattagccgggcatggtggcacatgcctgtaatctcagctactcgagaggctgaggcaggagaatcatttgaacccaggaggtggaggttgccgtgggccaaccttgagtggaggttacaccactgcactccatcctgggtgacagggtgagactccatctcaaaaaaaaaaaaaaaaaatatatatatatataattatatattttatatattattatatatattatatattatatatttaaaaatatatattatatatttaaaatatatattatacatattatatatttatatatattatatattatatatatataaataaataaaaattaaaaaacaaatgagaggctgggcatggtggctcacgcctgtaatcccagcactttgagaggccaaggcaggaggagcacttgaccccagcagtttgagaccagcctgggcaacacagtaagaccccgtctctataacagcaaaaacaacaacaaaaattagccaggtgtgctggctcacacttgtagtcccagctacttgcgaggctgaggtgggaggatcccttgagcccaggagacggagcctgcagtgagctgagatcacagcactgcactccagcctgggtgacagagcaagaccctgtctcaaaaaaaagatcagattattgatgatctctgagtatgatggaagggaaaggaaagcaggcttctaaagcactggtaatattccatttcagaacttagttggtggacagaaaagtattttattgttgtttaaaaataaatacacaagcacacacacttttttacttatgtagggtttcctgggaaacagattctgaggtggagatttgcaggcagatggttttggaggagtgctctgtggggggaaacttctaagggagagaggagcgcaaggtgggcagagggagacgtggaagtgtgatgtgcttgccaccagagcctcagccaggatggcagagaatgcggagctggggtggcctgtccgagggatccccggctgaggcatggagccaggcctttgtacttccttatgaaccagatatagaatgtgggctgcccctggggattggggataaccttgggccagatggctttcttcagctgaagtcccagagagaggtgcagctgtaagccatcagctaccaacaccccaggctgctggcagaaagaatgcctcagtcctaaagagggggtgtgggtggcatattacagcatccagcacgcctttgtacctacgatgtatttgacaacaaaaatttagaaagaggccgggtgcagtggctcacgtctgtaatcccagcactttgggaagctgaggcaggtggatcacttaaggtcaggagttcaaaaccagcctggccaacatggtgaaaccccgtctctactaaaatacaaaaattagccaggtgtggtggtgggcgcctgtagtcccagctacttgggaggctgatacaggagtatcacttgaacccaggaggcggaggttgcaatgagccaagatcttgcccctggactccagcctgggtgacagagagagactccatctcaaaaaagaaaaaataaatttagaaagaaaatatattcatgtaatacatcatattaacagatgaaaagatacaaataatttgatagaatttgacactctaggctatgcacagtggcttacacctgtaatcccagcccttttcgaggccgaggtgggaggatcgcttgaagccaggagtttgagaccaggctgggaaacaaagaaagaccttgtttctacaaaaattaaaaaattagccacacactcctgtagtcccagttaatcaggaggctgaggcaggaggattgcttgagtccaggagtttgcggctacagtgagccatgataatagtcttcaatctgataaaaggaacctaccaaaatcctataacaggtatccaacttaattagaaaaattacctttaaagaactgtcttagtccattttatgttgctgtgactgaatacctgagactgggtaatttataaagaaaaggggtttatttcttacagttctggaggctggggagtccaagtttgagggttttttttctggtcagcctctggtgagggtcttgtactgtgtcataatatggcaaaaggcatcatggccaagaggggtgcactgaagtccaaactggctttttataccaaacccactgtggcgataactcacccactcccatgataactcattcaaccattaatttttttttttttgagaaggaatcttgctctgtcacccaggcaggagtgcagtggtgcgatctcagctcactacaacatccgcctcccgggttcaagcgattcttttgtatcagcctcctgagtagctgggattacaggtgcgtgccaccacatccggctaatttttgtatatttagtagagacagggtttctccatgttggccaggctggattcgaactcctgacctcaggtgatccccctgcctcaggctcccaaagtgctgggattacaggcgtgagccactgtgcctggccaatttttgtatttttagtagagatggggtttaaccatgttggccagactggtctcgaactcctggcctcaagtgatccacccgcctcagcctcccaaagtgttaggattacaggcgtaagctaccgtgcccagcctcacccccagtctttcatctgatgcctgacgatgtccaggcaacgtggtaataatcatccagttccattttccttgtatttagttttcctgccgtacatctcaaaaggctgaatcaactcatttgcccatgcatctcctccaccagcacattctcccaagcctccatgggtgacagtttcaacaactggactgtcacctgtgccagggactgtgcttcccctaccccctgggatggtgtcctcattgtcagccaggcaccgagagatttggttcccaagcctcatgttaccatctgctttctcagaccactcctggtagaagctatgcggttctgcttcactaggaagcaatcctgagatggattttgaagtgcaggccagagacgctgcctcacacttataatcccagcactttgggaggatcacttgaggctaggagtttgagaccagcctgggcaacatagtgagaccctgtctctacaaaaaataaaaaattacctgggcatagtggtgcacatgtagtcctacttactcaggaggctgaggcaggaggatcacttgagcccggggggttgaggctgcagcaagctatgattgtgccactgcactcctgggcctgggcaacagagcaagacctcacttccaaaaaaaaaaaaaagtgcaaaagcattttcaaggagttacacttgtgaaatgaaaagtattgaccgggtgctgtggctcaagcctttaatcccagcactttgggagaccgaggtgggcggatcacctgaggtcaggggttcgaggccagcctgactgacacgctgaaatcccatctctactaaaaatacaaaaaattagccgggcgtggtggcgcatgtctgtaacatatatatatatgtaaaggattagataaataaatatcttctgcagtaggactgttgaaagaaaaattaaaaagaaaaaataaaaataaatatagatagaatgtgtgtttatctccatctatccatgtattcatctatcaacattatacacacacacactccctagttctgtccactgagaggtcctgggagtggtgacaccccagtagtaatgaatacaccaagcacccagatatggtgtgcttggtgtgttctacatccctccactatggaagtatgacaggaacttggcacatatcgttgtgccggaaaagtaaggaagtgcttgaggaatgatgagggcatattaaaatgacataggaatcagcctgaaggatctctcaatggccaaatctggggcaattttatttatttatttatttttttttttgagatggagtctccctctgtcacccaggctggagcacaatagcgcgatcttggctcactgcaacctccgcctcctgggttcaagcaattctcccacctcagcctcccgagtggctgggattacaggcatccgccatcatgcccagctaatttttgtatttttgtagagacagggtttcaccatctttgccaggctggtctagaactcctgacctcaggtgatctgccctcctcggcctcccaaactgctgggattagacgcatgagccaccactcccggctaattttagaaccaaaatgaataagaagagtgtgatgaacggaattgtgtctctgtccccagattcatatgttgaatcctaatctctagagtgactgtatttagagacagcgtctttagagaggtaattaagatcacatgaggtcatgagggtggagccctaccccattatgctttgggttttttttttttttttttctgagatggaatctagctccatcacccaggctggagtgcagtggtttgatcttggctcaccgcaacctccgcctcttgggctcaaacgatcctcccacctcactccctgagtagctggggctaccggcatgcgccaccatgcctggataatttttgtttttttaagtagagacagggttttgccacgttggccaggatggtcttgaactcctgacctcaggtgatctgcccaccctggcctcccaaaatgctgggattacaggcgtgagccacagcacccggccaattatgctatgtctttataagaagaaggagagaacaaggatgtgtgcccacaaaggaaaggccatgagagagaggacacagccagaaggtggccatctgcaagccaaggagaggcattaagagaaaccaagcctgccaggctgggcaccgtggctcatggctgacgtagcaggatcacttgaacccaggaattctagaccagcccgggcaacaaagagagatcccatctctacaaaaaaattttaaaaattagccgggcgtggtggtgcacgccttgtagtcccggctactctgggaggctgaggcaggaggatggcttgagcccagggagcccgggaggttgaggccgcagtgagctattgtcgcaccagtgcactccagcgtgggtgatagagcatgacactcaaaagaaacaaaaaccaaaaaagacatcaacctgccaacacctttttttttttttttttttgacagagtctcgtgtcctccaggctgaggctggaatacagtggcgtgatcttggctcactgcaacttctgccttccaggttcaagtgattcccatgcctcagcctcccaagtagctgggattacagcatgagccaccatgcccatctcatttttttgtatttttagtagagtcggggtttcaccatgttggccaggctagtctcaaactcctgacctcaagtgatcgcccacctccgcctctcaaagtgttgggattacaggcatgagccaccacgcccggctatgccaacaccttgatcttggacttccagcttctagaactgtgagaagtaaatttctgttgttgaagcccccaagtctgtgaattttgttacgggagcccaagccaatggatacagagagtaacattgtagcccactgaataaaataggaaaccacaagtcaatactgatatatgtagataaatgaatgaatccaaaggttgatgaagaatgggatatttacagtgttttaaagaacttatgaaacactaattacaaagaggaaagtaacttgacagtgaaggttggctgacaccactttaaatcaagtgatcaaggtgaaatgtcatcaatactgggacaaattgaaattgtgcagcacatgaaaaatgcagtggggacacacagaaaagtctctttggtgatattcttgccaaagatgttataatctgaatctaattataaagaaacatcagacaaaagcaaatggagagacactgtgcaaagtaaaactggcctggccaggagtggtggttcatgcctgtaatcttagcacttgaggctgccgaggtgggcggatcacttgaggtcaggagttcaagaccagcctggcaaacatggtgaaaaacccgtctttactgaaaatacaaaaattggccaggcaaggtggcctactcctgtaatcccagcactttgggaggccaaggtaggtggatcacctgaggttgggagttcgagaccagcccaaccaacatggagaaaccccgtctctactaaaaatacaaaaaattagcctggcgtggtggtgcatgcctgtaatcccagctattcgagaggctgaggtaggagagtcgcttgaacccgggaagcagaggttgcggtgagcctagatcacgccactgaacaccagcctgggcaacaagagcgaaactccttctcaaaaaaagaaaaagaaaaaagaaaaaaaagcacatcccgctaaccacagagatctatcttcgaaagccaagtggcttcctccttgtttctgtatgaattgttttatgtggttcaagacattgactcaggcacagcaagtacagctgaccagtaagttgaagctgatctgaacagtgttcagggctgagacagtgtcctaataatcaggggacaacacacacacgaaatataatcccaggccaggtgctgtggctcatgcctataatcccagtactttgggagggtaaggcgggaagatcacttgagcccaggagttcaagaccagcctgggcaacatagagaaaccccatctctacaaaagatgcaaaaaaggcatggtggtgtgcgcctatagtcacagctccttgggaggctgaggtgggaggatcacttgaggccaggaattcgaagctgcagtgagctgagatcataccactggactctagcctgggtgtctccaaaaaaaaaaaaaaaaaaaaatacagaaaagtacaatcccagagggcacacgtggtgccccctggagacagagagtttacagtttttagggaaccccaggcaggaggtgcattcataagaggttcaggggccccagtgtggtgttccagcctgggcctccagccctaaagttgccagaccagtccaaacggatctgctcagtccttgctgtcagagggaatgcccaaggcagtcaattccagatgggttttgcatgtccatgacaacagtgtctctgcctgaggagtgtggacagcaaccccagctgggcgttctggtggaatatccaggagctgggccaccccaggtggcaggtgagcaggtggaagtatagggatcaaatggagggtcacagtcaatttgaattcaaatcagtccagcagcttggaaaggcaagaccgggtgtttcttcttatttttctttgggaggaggggaaagttctcgggagtagttctgaaaggcagaggtcattactgcccacccccaactctgcatctccccagatgccaagtttgtgtttgggctttttttcaaacattaattaattaactagttaatttttagagacaaggtctctctctgtcacccaggctggagtgcaatggcgcgatctcagctcactgcaacctccgcctcccaggctcaagcgatcctcccacctcagcctcccaagtagttgggactacgggcacatgccaccacgcctggctaatttttgcattttttgtagagatggagtttccctatgttgcccaggttgcccaggctgggctcgaactcctgggctcaagaaatctgcctgcctcggcctcccaaagtgctgggattataggtgtgagccaccgcactctgcctgtgttttggctatttaaaaatgttttattggctaggcatggtggctcacatctgtgatcctagcaatttgggaggcttaggtgagcggttgcctgagcttaggagctcgagaccagcctggccaacatggtgaaacccccatctctactaaaaatatgaaaaattagccaggcatggtggtgcacgcctatagtcccacttacttgggaggctgaggcacaatactcacttgaacctgggaaccagaggttgcagtgagcggagatggtgccactgcactccagcctgggcaacagagtgagactctgtctcaaaaaaaaaaaaaaagaaggttttatttatttaaatataaatggggtctcactatgttgcccaggctggacttgaactcctgggctcaagcgatccttctgcctcagccttttgagtagctgggattacaagcatgtgctaatgtaaccggctctgtttttgcctttttgttacaaaatcagtatgtctcattcggtcattataactttagatttttttccatttttacggaggtaaaattcatacaatatataaatcactattttagccatttaaaaatgtatataattcagtggttttcggtacattcacaatgttgtacaaccatcaccaccatctagttcccaaatcaccccaaacaatccgtgtacctgtgagcagtcactctccatcctccctcctcctccctggcaaccgctaatctatttcctgtctccacagattttccgattctgggcaattcatataaatggattcataaaatatgtggccttctttcatttagcatgttttcaaggttcatccatattgcagcatatatcagtatttcattccttttttgtacgtttgttttgagacagagtctcgctccatcgcccaggctggagtgcagtggggtaatcctggctcaccacaacctctgcctcccaagttcaagcaattctcctgcctcagcctcctgagtagctgggattacaggcacccgccaccatgcccagctaattttttgtatttttagtagagacggggtttcaccatattagccaggctggtctcgaactcctgacatcaagtgatctgcccgccttggcctcctaaaatgttgggattacaggcgtgagcctccatgcccagcctattcctttttatgatggaataatttcccattgtatggatggaccacttttggtttatccattcatcagttgaaggacatttgcttgtttccactctttgtctcttatgaataatgtagttatgaacatttgtgtataagattttatttgagcacttgttttaaatcctcttgggtatatatgtaggagtggaattgctatgtcatgcagtagaattctacgtttagctttttgaagaaatgacaaacggctttctaaagcagctgcaccattttacattcccatcagcaatgtgtgaggataatctccatatcatcaccaacacttgctgttttcttctttttttctttttgctcatattcatcctactgggtaggaagtggtattttactgtggctttgatctgcatctccctaaggattaatgctgttgaacgtcttttcatgtacttaccgaacactggtatatcttctttggaaaaatacctattcaagtcctttgcccatttgaaaactgagttgcttatcttttattgttgagttgtaagaattctttatatattttggatactagacccttatcagatatataatttgcaaaacattctctcccagtctgtgggttgtcttttcattatttggttgtgtcctctgatgcacaaaagttgtggggtttttttttttgttgttgttgtttgtttgtttttgagacagagtctcactctgtccctcaggctggagtgcagtggcgtgatctcagctcattgcaacctgcgtcccctgggttcaagtgattctcaggcctcagcctcccgagtagctgggattataggcagctaccaccactcctggctaatttttatatttttagtagaggtggggtttcaccatgttggccagacttgtctcgaactcctggactcaagtgatccttctgcctcagcctcccaaagtgctgggattagaggtgtgagccactgcacccagcctaaaaattttaaattttgatgaggttaaatttacttttttttttcctattgttgcttgtgcttttagtgttatctaaaaatcaattaccaaatcaagatcataaagagatatccctgtattcttctaagaatgttatagtcttagctcttagtgtttgaggcactttgacttaatttctgtagatggtgtgagataggggcccagttgcactcctttggatgtcgttatctggcaccatttgttgaaaatatgattctttcccccactgaatggtcttggcaccgttgttgaaaatcaattgatcatcgaggtatgagtttatttctggactctcgattctattccattgatttatgtctctccttatgaggtaggaggtgggacttgactccagaggcagggctcggacactggaccaaattgaggactagctgaaacagggctggggtggaatgagctttccgtaagacacgctcatcagttgccatgtcagtttaccgttgccatcgcaacaccagggggttatcccccgtctcttccatggcattgactcgatgacccaaaagttattacccattccctagaaatttttgcacaaatcaccccttaatctgcatgtgtttaaagtagatataaatgactgcaaaactgccctgagctgctagtctctgccagagccctgctgtgcaggagtaatcagagttgtaacagggctggagctataacactgccccttcaataaagctgttttcttctaccattggcttggccttgaattctttcctgggcaaagccaagaacctcatgggctaagtctcactttggggctcacttgtccaacattacttatgccaggaccacactgttctgattactgtagctttgtagtaagttttgaaactggaaagcgtgaatcctccaactttgttctttttcaagattgttttggctatttggaacctcttgcaattccatgtgaattttgagatcagcttgtccatttctgcaaaaaaaatggctcttaaaattttgacaagtggccgggtgcagtggctcacgccagtaatcccagcactttgggaggctgaggagggcggaccacccgaggtcaggagtttgagaccaccctgggcaacatggtgaaaccccgtctctactaaaaatacaaaacattagccgggcgtggtgtcacccgcctgtaatcccagctacctggaaggtggaggcatgagaattgcttgaacctgggaggcggaggttgcagtgagctgagactgtgccgctggactccaccctgggcaacagagcgaaactctctctctcaaaacaatttttttttgataggcattgcaactgaatctgtagatcaatttagggagtattgtcatcttaaaaatataaagtcttccagttgatgaacatggggtatctatttatttagctcttatttaatttctttcagcaatattgtagctttcagtgtaaaagtagaattgttttcttaatttcattttcagattggcattgctagtgtattgaaatacaactaattttcttttcttatttttcgcagagatggcggcgggggagggggggtctccctttgttgccccggctggtcttgaactcttggcctcaagcaatcctcccacctcgcctcccaaagtgttgagaattataggcataagccactatgctgagccctgattttcttttctttttttttttttttttttagacggagtctctttctgtcatcccaggctggagtacagtgacgcaatctcggctctctgcaagctccacctcccgggttcacgccattctcctgcctcagcctcccgagtagctgggactacaggtgcccgccaccatgaccagctaattttttgtattttttttttggtagagacgtggtttcaccatgttagccaggatggtctcgatctcctgacctcgtgatccgcccgtctcggcctcccaaagtactgggattacaggcgtgagccaccacgcccggccgagccctgattttcaatattgatttgtatcccaaaaatgtcctgaatttattaacctttttttttttttttgagacagtttcgctcttgttgcccaggctggagtgcaatggcgtgatctttgcttaccgcaacctcagcctcccgggttcaagcaattctcctgcctcagccttccgagtagctgcgattacaggcatgggcaaccacgcccgacccattttgtatttttaatagagatggggtttctccatgttgaccaggctggtctcaaactcccgacctcaggagatccacccacctcggcctcccaaagtgttgggattacaggcgtgagccaccacgcccagcgtcattttcaaattctcatctaaatgtttcatccagaagggttggatacaaaagggatggaagcatttcacagaagaaacatttttatacaagttgactagaaacacacatcacatccaggaattggtcaggatgaaattctaaattttcttctttttttttgtttgttaccagcttatatatcaagaaaagaagcggggcacgattgctcatgcctgtaatgctagcactttgggaggccgaggaggccggatcacctgaggttgggagtttgagaccagcctggccaacagagtgaaaccccgactctactaaaaaaatacaaaaattagccagacgtggaggcgcgggcctgtagtcctaggtacttgggaggctgaggcaggacaattgcttgaacctgggaggtagaggttgcagtgagtcaagatggcgctactgcactccagcctgggcaacagagtgagaccctgtctcaaaacaaacaaacaaacaaacaaacgaacaaacaaacaacagaaatcctaaattttcaaaatgtttttctataacctctttcccgatcatcatccaatgaacttcctgcaaaagctcaatccctttctggggaccgctgcatcagtaatcaaactgccttcctaaggtgtgtgttgtagcaggagagaagtggggaagtagagtcaggctacaggccacagttgcaacctacaactaatccagaaagttgagcacaaggcaacagaaatgaggcgtctcccaagtgtccaacctgtcagaagcagccagaggggtcacagtccctgagaggtgccctccttgaacttacagcttttggcaggaatcacaggttagaaatacattcgatggccaggcgcggtggctcatgcctgcaatcccagcactttgggaggctgaggcgggaggatcacctgaggtcaggagttcgaaaccagcctggccaacatggtgaagccccgtctctactaaaaatacaaaaattagccaggcatggtggcgtatgcctgtaatcccagctacttgggaggctgaggcaggagaattgcttgaacccaggaggtggaggttgcagtgagctgagatcacaccactgcactccagcatgggtgacagaaggagactccgtctaaaaaaaaattaaaaaaaataaaagaaaataaaaagaaagaaatatagagccaagaagccagttgattgtagatggtttcctcaaagaagaagccctttccttggcctggcgtggtggctcacatctgtaatcccagcactttgggaggccaaggcaggcggatcacgaggtcaggagatcgagaccatcctggctaatacggtgaaaccccgtctctactaaaaatacaaaaaattagccgggtgtggtggtgggcgcctgtagtcccagctactcgggaggctgaggcaggagaatggcgtgaacctgggaggcagagcttgcagtgagctgagatcacgccactgcactccagcctgggggagacagtgagactccgtctcaaaaaacaaaaagaagccctttcctgtgggcatttttatgtgatccagatggtccagtcagcatccatgatgttttcagtttaggtcccacggagggtgccctaagtctgcaatggtctcatagtcgaagtgctgttcctggagtgtgcgcccgtttttaatttagcacagcacatgctgagactgaaacagcacagagcagacagcagtatcaggttttggcttacagtcaggtccaggccagtaggatctgtgaattcaggaagccacaagtcagtggctgttctttggcagcagcaaagccaagatgctgcaggctagaaggttctgtttcaagtgcaagtgacaaacaaggctttcctaagcctttttacctcgtcaatcttagagctggaattggtgcactcaaaaacacgcacgggctggatgcagtggcttgtgcctgtaatcccagcactgtgggaggctgaggcgagaggattgcttgagcacaggagttcaagaccagcccaggcaacatagtgaaactgtgtctctacaaaaaaaaagaaaaaaaaattaaaattaactgggcgtggaggtgggcacctgtagtcccagttacttgggaggccgaggtgggaggatcgcttgagcccaggaggtcgaggctgcagtgagccatgactgcatcattgtactccagcttgggtaacagagtaagaccctgtctaaaaacaaaaaaacaaacaaacaaacaaacaaaaatgcataccttcaagaaaaagagaagacaaccacagaccgggagaagggatttgcagaagacatatctgataaaggactattattcaaaatgtacaaagaactcttaaaactcatcaataagggtggtgtgtgcctgtaatcccaactacttgggaggctgaggcaagagaatcacttgaacctggaagatggagtttgcagtgagccgagatcacgctattgcactccagcttgggcaacagagcaagactctgtctcaaaaaaaaaaaaaaaaggttgggggcagtggctcacacctgtaatcccagcacattgggaggccaaagtgggtggattgcttgagtccaggagtttgagaccagcctgggcaacgtggcaaaaccccctctctacaaaaaaataaaaaaacattagttgaatgtggtggtgtgcccttgtggtctcagctacttgggaagctgaggcaggaggatggcttgagcctgggaggcagaggttgcagtgagccatgatcacaccactacactccagcctgggtgacagagcaagactctgtctcaaaaaaaaaaaaaaaaaaaaaaaaaaaaaaggctgagtgtggtggctcatgcctgtaatcccagcactttgggaggccaaggcgggcggattgcttgagcccaagtgtttgagaccaacctgggcaacaaagcaagacctcatcttaaaaaaaaaagtattagccaggtgtggtggcatgcgcctgtagtcccggctacttgggaggctgaggcaggaggctcgcttgagcccaggagttttaggctgcagtgagccatggtctgatcatgctactgcacttcagcctcggcaacagagtgagaccctgtctctaaaagtgatctatcaagccatgaaaagacctggaggaaccttaactacatatcactaagtaagagaccaattaggtaaggatacatactgcatgattccatcaatatgacattctggaaaaggcaaaactatggagtcaatataaaatcagtggtcggccaggcgaggtggctcacgcctataatcccagcactttgggaggctcaggcgggtagatcgtttgaggtgaggagttcaagaccagcctggctacatggtaaaaccccgtctcaactaaaaatacaaaaaaattagccagacgtggtagcagtcacctgtaatcccagctactcgggaggctgaggtgggagcatctctcgaacccgggaggcggaggttgcagtgagccaagatcatgccactgcactctagcctgggtgacagagtgagactccatctcaaaacaaatacaaaacgaaacaaacaaaaagaccagtggtcctctggggttgagggagggaggagtgaactggtagagcacagaggacttttagggcagtgaaactagtctgtgtgataccgcaatggtagatacatgtcgttacacatttgtccaaatccagagaatgcacgacaccaagtgtgaccctaatacaaactatggagtttgggtgataaggatgtgtcaacataggttcattgattataacatgtaccactctggtgggggatgttgatagcgggaagggtgtgtgtgtgtgtgtgcgtgaggggctgggggaaacgggatataggagaactctgtactttctgctcaattttgctgtgaacctaaaactgctctaaaaataaagtctaggctgggcgcggtggctcacgcctgtaatcctagcactttgggaggctgaagtgggaagataacttgaactcaggagttcgagaccagcctgggcaacatagtgagaccttgtctctaatttgaaaaaaaaaaaaaaaaaacccaaaagccaaaaaaacaaaaattagctgggtgtggtggcacacgcacctgtaattccagctactcaagaagctgaggtgggaggattgcttgagtctaggaggtcaaggatgcagtgagatgagattgcactgttgtactctagcctgggcaacagagtgagaacgtctcaaaaaaaaaagcatattaaataaacgaaactttttcagacatacaaaaaaatatgcacaccaggctgcctcatcagctgcctttaagggtccagcatttgattttaacaagggcttattagcaaactagaaagtgttttttaaaactctaaaagtagctgggtgtggtggcatgtgcctgtagtcctagctactcaggaggctgaagcaggaggatcatttgagcccaggaggtcgaggctgcagtgagccatgatcgcgccactgcactccagcctgggtgagagtgtgagatcctgcctcaacaaataatttttttgctttaaagtgaaactccaaaagtttatttccatccagagattgcgtcgctctttttactgcttcttcctttctccaaaggctccagtaagccaaaatcatggcagaaatcatcgtttacagacactgtacttgttctgtttccaatactcagagaatttaaattccaatcctcccattgttggcaaaaagcaagggatttgttttatacacacacaatgatttttgcagctttccctaatccagatgatcctcatagtgtatagtgcaagcataaacattttacattgattttaaaaaatcatacgtttaggccaggtgtagtagctcacgcctgtaatcccagcactttgggaggccgaggagggtggatcacctgaggtcaggagtttgagaccagcacagccaacatagtgaaaccctgtctcaactaaaaatacaaaaaattagctgggcatggtggcacgtgcctgtaatgccacttacttgggaggctgagaatcacttgaacctgggaggtggaggttactgcactccagcctgggcaacagcgagactgtctcaaaaaaaaaaaaaatcatacatctagatgaaacagtcacaaaatacaaaggagcttttcaaatttctccctttttttttctcattgcaaacctactcaaatgtctatcaataaattcaacacttaatagttggaatagaaggcagggttgctgcaacctgtgggctgaagaaatgggtagaatctacagtcagcctttggtatccatgggattggttccagaaactcccatggatcccaaaatccacagatactcaagtccttatataaaatgcagtgatatttgcatataacctccacacatcctcccatatactttattaattattattttttcgtgatggagtttcactcttgatgctcaggctggagtgcgatggtgcgatctcgctcgctgcaacctccacctcccgggttcaagcaatcctcctgcctcagcctcccaagtaactgggcttacaggtgcccgccaccatgcccagctaattttttgtatttttagtagagatggggtttcaccatgttggccaaaacttacacacataaacacagactttgcatggtaccatttgcagttgagacaaatgtaaatcaatacaaagaggcagtgtgaaatcataattgcacgaaattaactgaagtaatactgtactactgtaataatttcatagccacctcctgttgttattgcagtgagctgaagtgttgtatcagcttaaacaccatgtgatgctaatcatctccaggagttcgtttctccagtaaattgcatagcgcagtaaacagtgatatcttccggttctcgttcatttttcatcctgttgagtgcaatatcgtaaaccctgaataacaccacgggacccatgcaaagtgccactgatgaaactgacagtgctcccaagaagtagacaagtcatgacattacgagagagttgatttgcttgatatgtaccatagattgaggtctgcagctgcagttgcctgacatttcaagatgaattcagcattgaggagcattgtaaaaaaaagaaaatgaaattcccgaagtggtcacagttatgccggcaagcaggaaatccttgcactttttgtgaaatacctttttatctcatactgaaaatgcaaagccaggtgtgatggctcacgcctggaatcccagcactttgggaggctgaggtgggtggatcacttgaggccaggagttcgagaccagcctggccaacgtggcgaaaccctgtctctaccaaaaatacaaaaatgaactgggcatggtggtgggtgcctgtaatcccagctacttgggaggttgagacacaagaatcacttgaacccgggaggcagaggttgcagtgagcccagatcatgccactgcactctagcctgggtgacagagcaagactctatcacaaaaaaaaaaaaaaaagaaagaaagaaaatgcagtttttctgtgggtgcagaattgctataagaaaggcatacttgccgagcacggtagctcacgcctgtaatcccagcactttgggaggccaaggtgggcggtcacgagatcaggagatcgagaccatcctggctaacatggtgaaaccccgtctctactaaaaatacaaaaaaacttagctgggcatggtggcgggcacctgtagtcccagctactcgggaggctgaggcaagagaatggcgtgaacccaggaggcggagcttgtggtgagccgagatcgtgccattgcactccagcctgggcaacagagtgagactctgtctcaaaaaaaaaaaaaaaaaaaaaaaaaaaaaaaaaaaaaaaaaaaaaaagaaagacatacctatagactctaatataattctagaaaagtgtagccattatatgacaacttaaagctaaaggaaggtgagggacataaatctggagagtttaatgccagcaaaggatggtttgataattttaaagagtttggctgaaaaaaatatcaaggtaacaggagaggtggcttctaccaaccaaaaggcagcagatgggttcccaggtgccaatgagaaaatcattgaggagaaaagttatctgcctaaagagggttttttgtttgtttgttttgtttgtttgtttgtttttgagacagagccttgctctgttgcccaggctggagtgcagtggctccatctcagctcactgcaacctccgcctcctgggttcaagcgattctactgcctcagtctcctgagtagctgggattataggtacccgccaccatacccagctaattttttgtatttttagtagagatgggatttcaccatgttggccaggctgatctcaaactcctgatctcaagcgattctccccacttggcctcccaaagtgctgggattacaggcaggagccacacctcgcctggtcatgaagaggtttgtaatgcagactaaagtgccctattctggaaaaaatgcctcaaaggacatttattagtaaggaagagaagcaagcacttaaggcaggtagggataggctgactctactgtttcgtgcaaatggtgtcagatttatgatgaggctgcccttacacagaaaactgctaacctccaagacttgaaagataaagctgccagtctttcagttgtacaacaagaaggcctggacaacaagaacccttcttctggattggttccaccgacgctttgtccttgaagttaggaagtaccttgccagttagttactttgatattagacagtgtccctggccaccaagaaccccacgaatgcaacaatgaaggtgccgaagtggtctcattgcccccaaacacagcatctctaattcagcctctagatcagggggtcataaggacctttaaggctcattacacactgtggaaaggactgtcaacactatggaagaaaagcctgatgtagagaacattagaaaagtctggaaggatgacaccactgaagaggccatccttgttagagaaaggctacaaataccattgagccaaaataataaattcctgcaggagaaaactgtgtctatatgttgtacatgacctcacaggatttataacagagccaatcaaggaaatcattaaagagattgtggatatggcaaaaaaaaaaaaaaaaaggtagggggtgaagggtttcaagccatggatcttggggaaattcaagagctaatagataccacaccagaggaattaacagaagattttttttttttccctgagatggagtctcgctctgtcacccaggctggagtgcggtagcaaaatctcagctcactgcaacctccgcctcccgggttcaagtgattctcctgcctcagcctcctgagtagcagggattacaggcacccgccaccacgcccagctaatttttgtagtttcagagacagggtttcgccatgttggccaggctggtctcgaactcctgacctcaggtgatccacccccatcccaaagtgctgggattacagatgggagccaccgtgcctggccagaagatgttaactgaagatgtttttgacttctttcacaacatggacccctctgtgatacaggaactgacactaaagcaaaccgtggaagaagttttggtgccatatagaaacatttttagagaaatgaaaaagcaaaaagtcagacagaaactatgatgtatttctgtaaagtacctgcctgtcctgcctccctctccacctccatcacctcatccacttttgccacctctaagacagcaagaccagccctcctcttcagcctactcattgtgaagataacgaggatgaagacttttatgatgaccacctccacttactgaatagtaaatgtactttctcttccttataatttgcttaacaacattttcttttctttagcttactttattgtaagaatacagtatataatataataacatacaacatatgtgttaattgaccatttatgttatcagcgaggcttctggtcaacagtaggctattagtagttaagttttgggggaatcaaaagttatactcagatttttttttttgagatggagtcttgctgtgttgcccaggctggagtgcagcggtgcaatcttggctcactgcaacctctgcctcctgggttcaagcgattctcctgcctcagcctcccgagtagctgggattacaggtacctgccaccacgcccagctaatttttgtatttttagtagagatggggtttcaccatgttggccaggctggtcttgaactcctgaccttgtgatccacctgccttagcctcccaaagtgctgggattacaggtgtgagccaccacatccggctatcctcagatttttaacagcaaggaaggtcagcaccccaaccgtcacgttgttcatgggtcaactatataatatttccacatcacttcattctcacggattcaacatggtacttggcatggggcaaattcaagtttttactttttgaaactttgtggaagtttttttccccaaatattttctattctttttttttttttttttttttttttttgagacagggtctcactctgtctcctaggctggagtgttgtggtctcaatatcgggggctccagtgatcctcccacctcagcctgtcaagtagctgagactacaggcacacgctcccccaccacacccagctaattttttaaatttttttgtagagatgggtctcactatgttgcctaggctggtcttgaactcctgggctcaagcaattctcctgcctaggcttcctacagtgttgggattataggcgtgagccaccacatccagtctttcccgaatattgtcttttgtttgagacagagttttgctctgtcacccaggctggagtgcagtggtgtgatcttggctcactgcaacctccgcctcccaggttcaggtgatcctcccacctcatgctcctgagtagctgggactacagacgtgtgcctccatgcctggctaatttttttgtttgtttgtctgtttttgagacaaagtctctgtcgcccaggctggagttcagtggagcgatcttggatcactgcaacctctgcctcccgggttcaagcgattctcctgcctcagactcccagacagctgggattacaggcacctgctgccacgactggctaatttgcatttttattttatttatttattttttgagacagagttttgctcttgttgccctggctggatagcaatggcgcgatcttggcttacggcaacctctgcctcccaggttcaagcaattctcctgcctcagcctcccaagtagctgggattacaggtgcccaccaccatgcctggctaattttttttttttgtatttttagtagagatggggtttcgccatattggcctggctggtctcgaactcatgacctctggtgatccatctgcctcagcctcccaaagtgctgagattacaggtgtgagccaccatgcccagcaatttttgtatttttagtagagacggggtttcaccatgttggctagcctggtctcgaactgacctcaagtgatccacctgccgcggtcccccagagtactgggattacaggcgtgaggcaccaggcccagcctcccgaatatttccaatctacagttggttgaatccacagatgcagaagctagccacatggagggccaactgtgtatgtttatcttattctttttttcccatctggcttatcgaaagctttgagctggccggcaatagatttaatttcttttactcccagttggaggaaagagcacctataaactgtttactgtctttgacccaccaaaaactcattttgggaaagtcttggccctttctcttgcagcctacagaagagagggaaaaaagccaaaggtgtcacttgggccatgcttttcttcctcattgtagccagcactcaccaaaatcagccaggggatccagggagtcagctctctagaggctggacctattgtcttttttttttttttaatttgagacggagtctcgctctttcgcccaggatggagcgcagtgatgcgatcctggctcactgcaacctccacctcccggattcaaacgattctcctacctcagcctcccgagtaactgggattacaggcgcgtgccaccatgcctggctaattttttgtatttttagtagagacagggtttcaccatgttggccaggctggtcttgaactcctgacctcaagtgatccgcccacctcggcctcccaaagtgctgggattataggtgtgagccactgcgcccggcctcagctagtgtttgctttcgtacagttttccctcctcaactgggactacttatgattctcaaccaaggcagtaactctgcatttctattaaaaagatctgaagtggttttggcaaaataagaaatttattacatatgattggcagatacatgctgctgatatattattcttactgtttgaaaaaaagtcaaaataaaaataatgttattttaattttaaataccacacaattacaggtccttgaggatcagggttgggctcagggaattacctcgttttttcagagaaaccagagtgggcagaaccatctccaaattcttttttttttttgagacagggtctcgctctgtcacccaggctggagtgcagtggtatgatcatggctcactatagcctcaacctgggcacaaatgatcctcccacttcagcctcccaagtagcttggactacaggtgtgtactactgtacctggctaacttttgtattttttgtagcgatgggggtcttactacattgcccaggctggtcttgaactctggggctcaactgatcctcccaccttggcctcccaaagtgcagggattacaggtgtgagccaccctgcctgatccaaactttttctttttgagacggagtctcgctgtgttgcccaggctggagtgcagtggcatgatcttggttcactgcagcctctgcctcccgggctcaagcaattctcctgcctcagcctcccgagtagctggaattacaggtgcacaccaccaagcccggctaattttttggatttttagtagagacggggtttcaccatgttggccaggctggtcttgaactcctgacctcaggtgatccgcctgcctcagcctcccaaagtgctgggattacaggcatgagccactgtgcctggcccaaactttttttttttaacgtagactttcagctgcatgacctggtcccagccctgtagctcggaagccccaggaggtgaggttcacacccttagggctgggactctctgagccctaaggatgagattctaagttcagagatgagttgagggcttccctgaagggaccaaggaagtccctgtggcagaaacaacaggagacaagaggtcagtggtgcggaggggaggggatggtacagaggggcctggggctggatcggagggttttggttgggaggagaagagaggggagggcaagaattcttctccaggatgggcattcccccatgctcacttgtgggtttcccctcagtacagtagggcccccccgcaaagcagcagctgcagtaggtagataagatggaagaagcttcttctggtagtttctagaacctgaagacagggcccgtcagggcctttgattggacccaggaattctcagtatgccagggaggtacaagtgcttggttggttaatgaggggtcccagccaatggtcccaggccctggaaggcacagtcaggctgtcttgcaagaagggtagtgctggactaggacagacggactcgcacgatcacactggagttggtcacacgggctccatagtggccagcccagaactgtgtgtcctggccccggtgttcgaaagacacaaagcggacgcccatcttgatgttggagaacacgtgggtgacctgtaggcagaggaggggctcagctccattgtgccacagcctcccctccaaagctgaggttagggccttctggaagatggttattttccaaggatggctataaaatctccaattgggccacatgttcttctagaatcttatagaatcttccactccctcattaaaaagtagaatctggtcgggtgcggtatggctcgtgcctgtaatcccagcactttgggaggccgaggcaggtggattgcttgaggccaggagttcgagaccagtctggccaacacggtgaaaccctgtctctactaaaaatacaaaaaatattagctgggcttggtggcacgtgcctgtagtcccatctactcgggaggctgaggcaggagaatcacttgaacctggcaggcgaaggttgcagtgagcagagatcatgctactacactccagcctggatgatggagcgagactctgcctcaaaaaaaaaagaagtagaatctaactcccttccccatgaatcaaggtgggtttgcttgtcaccaagaatgtggtgaaaatgatgctcagtgactttggccaagtgactttttaaggctaggtcagaaaaagcaaggcagcttctactgtttctctggaaccctcctccctgagcaaccacatgagcaatctgactgcctaggagccgccatggtgtgaggaagcccaaaggagcccaagcagagagatcccatggagaagctctgagactaaatgaagaaagagatgtttggccagccaccaacagctacacacatactacccaccaccctggcctgcagctccaggcatcatcagaatgtcactgtctgaacgctgaaagacaggagccagaactgcccaggtaagccctcctgaaattactgactcacagaaatcacgagaggtagtcaaatgactgtcattgattttttttttagacagagtctcgccccgtcacccaggctggagtgcaatggcgcaatcttggctcactgcaacttctgcctcccagattcaaacgattgcctgcctcagcttcccgagtagctgggattacaggcatgtgccaccacgcccagctaatttttgtatttttagtagagatggggtttcaccatgttggccaggctggtcttgaactcctgaccttgtgatccgcctgccttggcctcccaaagtgctgggattacaggtgtgagccaccgcacccagccagactgtcactgattttaagccactaagttttggggtgatttattttgcagcaataggcccccagcatcctttccccaaacccccataggagactcacgtgaaggcaggcattgttgttccactgcgggatgggatcaggcacagcagagaatttatctagaacagtctggttggcgtctagaagttggacgaggagtctgtacatacagccgctgtcgtgtcgggctccccacctgtgggaggaaggagccatgaaggctggacctgccaccccatctctttgggtgtctgcctaccttgtccgaatgcccttcccatgtgtgcaaatccagttcctctaaagagactcctgggaggtgatctctggacctttggaatgttgtgtcagacaggagtgtctttgatggggacccaggtggtactggataatctaccaatatgatttagggcaggggccagccacactcatataaatagtctcagtggggagtctccggaaagacccacaatgtgactttcggtgggggctgggagtcagggaacgtcagttgacctggaggctgagattaaccacgtgggcaatcgatcaatccatcaggccttgtgatgaacccaagaaacactctggacaccgaggctcaagtgaactcccttggtcaacaaaattccatgcatcttgtcacacatcagtgccagcacggtaacatgtcctgatgccatgggagaaggacaacagaagctctgtgtttgatcttttccctggatgctgctctatgccctccttttcttggctgattttaatctgtatcttttccctgtaataaaccagaagtgtgtagtagctttctgtgagttcgtccagtgaattattgaattgtgaaggtggttttggaagtcctccaaacttgtagttggtaaagatgtagagatggggttttgccatgtgacccaggctggtcttgaactcctggactcaggcgatcttcctgcctccgcctcccaaagtgttgggactataggcgtgagccaccatgcccagtcagattttgtttttaattattactcatcaaactacataacatatttgtgttgttgtgacatatcatgtcagaagcgaggatggtcttagggattccatccccgaactttgtagcaagctctaaacttctcacaaatattgatgcctgtctgggcgaggtggctcacgcctgtaatcccaacactttgggaggccgaggtgggtggatcacttgaggttaggagttcgagaccagcctggccaacatggtgaaaccttgtctctactaaaaatacaaaaattagccaggcgtggtggcaggtgcctgtaatcccagctacgaggcaggagaatcgctggaacccaggaggcagaggttgcagtgagctgagatcgcaccattgcactccagcctgggcgatagagggagaccctgtctcaaaaacaaaaaacaaacaaatattggtgcctggctctcaccctcagatgctcagatttaatgggtatgaatggtgcctgggcattttatgttttaaaagctacctttatgaggtgcggcaaaatttgggagccactgattatcacaatcaaatagtacccactgatcaaaacaacacaaatatgttacatagtttgataagtaataacaaaaaataaaatctggccagccgtggtggctcacacctgtaatcccagcactttgggaggcagaggtgtaaggactgcttgaatccaggagttcaaggccagcctgggtgacatggcaaaaccccgtctctacagaaaatatggctgggcatggtggctcacacctgtaatcccaggactttgggaggcagaggcgggcagatcacctgaggtcaggagttcgaggccagcctggccaacgtggccaaaccccgtctctactaaaaatacaaaaattagccaggcgtggtggtacacacctgcaatccgagctactggggaggctgaggcaggagaatcacttgaatccagaaggcagaggttgcagtgagctgagattgtgccattgcactccagcctgggtgacaagtgaaactttgtctcaaaaaaacaaaaaattcaaaaattagccaggcatgtaaaattagccagtatgcacctgtagtcccagttactcaggaggctgaggtgggaggattttttgaggccaggtggtagagattgcagtgagccgagatcacgccactgcactccagcctgggtaaaagagcaagactctgtctctaaaaaaaaaaaaaaaaaaaaaaatcttattggagatgtatctcttaatgagatggagttggggaatagggttatggtgccttgattaagagtgaatttgctggccaggcacagtggcttatgcctgtaatcccggcactttaataggctgaggtgggcagatcacctgaggtcagcagttcaagaccagcctgggcaacatggtgaaaccccatctctactaaaaataaaaaaaaatagccaggtgtggtggtgcacacctgtaatcccagctactcgggaggctgaggcaggagaatcacttgaatctgggaggtagaggttgcagtgatctgagattgcaccattgcactctagcctgggccacctagtgagactctgtctcaaaaaaaaaaaaaaaaaaagtgaatttgctaaggccccaaatttccaatggccactttgcctggctccccagtagtccttacatctggggaccacaccttagtgaggggcttttttcctataaaactagagaagggggacactgagaaagagattggggaacgagaatcatatgatacttcccacacagatgtaacctatagcagattaattgtgtaatagggggctcatggctgtagtggacctggaatttgactcccataaaaccatctgggtcatatatcccctggaaagtcttcatgcaccccagtttcaagaccatcactacagaggacaagctctggagtcagaatctgactctgagccttatgccaggttctgccaagcccaggctgtgtgaccagaccagggcaagtcatctcccctttctttttttgatggagtctcgctctgttgcccaggctggagtgcagtggtgccatctcagctcactgcaacctccacttcccgggttcaagtgattctcctgcctcagcctcctgagtagctgggactacagacacttaccatgacgcccagctaattttttgtatttttagtagagatgggttttgccatgctggccaggctggtctcgaactccttagctcaagagatctgcccacctcggcctcccagagtgctgggattacaggcatgagccaccgtgcccagactgccatctcccctttcccaacctctcaatttcctgagaagctctgaatgatctgagggcttgaaatacaccttcccacaggatcaaggttcaaaaaaaggtgctcacataaagtacttgctatgtgtttgccatataataattgtcattgcaagagccctatcttgtaaacaggggaaacagaggtatgctgtgacttgcccaaggctacaaagccacagagctagggtttgaatctgggaggtctggctccagaacctaagctcttggctaactatgctgttttctcctcctaaggcaaggagcatctcattcattcacagacaagactgagctgggccaaaggtctctgtactggatctcatcttctgtcttccaatccacatccttttgggcatgagcagaaagtgtgtactctgctaattactagaactgtgagtgtgtttttcacttcacctccctgaacttcagtttcttttctttcttttttttttccaggactgagtctcactctgtcgtccaggctggagtgtagtggtacaacctccacctcctgggttcaagtgattctcctgcctcagcctcccaagtatgtgggactacaggtgtgcactaccaggcccggctaattttttttttgtatttttagtagagacgaggttttgccatgctggttgggctggtctcgaactcctgacctcaagtgatctgcctgcctcgaccccccaaagtgctgggattataggtgtgagccaccatggctggcctgaacttcagattttttatctgtaaggaggggttaggaggcctaaattaagtcacccataaaaaggccatgtcacatgcagtcagtgcttagcaaggggctattttaatcgtcacactcaccagtcagagacacaaatctcaatcctgccactatccagcagttctggccacagaccctcctcctctaggtccaagacctgcttcttgcaacaccagctgggaatgcaggagacagggtaatgagaacaggcaggcctttctcaacaaggggccggacctttggatagcaggggcattcacctgaatgaagtcacgaagcacgtctgagaaggggccccaggcacggttgtcctgttttcctccaccacccagccgtccccaccgtgttgcaccatccactttcggaggccttctgtgaaataaaaaaggcttgtgcccaagttccagtcgcccgcctgttggttcctagtgagaccccgcccctagcccctcccacgtgctcacagtgcagctcactcacctgacccttcccaccgaggccccgcccccttcccctcccaccagctcagggcaaagccccgctcctctggcccttctcactgatttgcagcaaagccctgcccctccaacccctctctcgggctcccagaactgccccactcccacccctcccacaggcaaacggtgaagccctgcccagtcagccctgcaccctgcgtgccaatgctgcctcgtccctccgacacctcccaccggctcccaatgctgccccgcccctccggcacctcacaccggctcccaatgctgccccgcctctccgactcctcccaccggtcccactgcggccctgcccctgcggcccctagtaccggtcccagtgcggccccgcccctccggccccgctaccgctcccactgtggcccagcatcctggacttcctcttccgagatcccaccttggccgcaggggttgcgaataaggttgcgtccgatgggtctgcgcgcgcagaagcggcccagggggcaaggcctggcgttacgggcgggagactggcagctgcgggcgaggtgcagcagcgcgcggccggtggcgccgtggtcgcgggccaggatcagcagccacagggcctggccgtccaccagggctcgccagccccggcacacttggcggcagcgcccgagcagcgtgcgcggggggacgtggctcagcaccaccagaagcagctctgggggtagttggctcaggtccagcgcctcttcgggttccggctccggcgcggggacccgggcggcccggcccctggagaccgaggcgcccatggtccccccgccaggcccggctgtggctgcgggagaggaagggtcaaggcgtcagggaccagcagcctccgcggcgcgcagcctctgcctgccctgattctgccagccgcacccccgtcttcaccatccctgggccccgtccccaagtccccatcccccagcccgtccttgatagccccgatatcccggagaccccgcggtctgtgtgtatgccccgaattgcatgcaatcagcccccctcggcggccgcaccgacaccgcaccccaagtcctaccccggggcctggcggcgctcctcgccgggatgccctagctgtgccgcaagctccccacgcccctctgcgtcctttttactcgccggcccctcccctcttactagccagcttcacccacccctgcatcctctttcttactcgccagcccctcccgcctgctccctcccgctctccaaacccaacctgcttcccgcgacggggccaggtgcagccaggagccaaggcctgctgctcacagccgtcccctccagccggccccttgaagtgtccctaattcgttagtagcaatgagacgtctggctctgagcaaccattgttattttggtcaggcttctgagtgggaggcctcgtatccgttaacgtgttaaaaaatttccatcacctttaaggtcgggcgtggttatcttcatttcacaggagaaaacaggctccggctgctaaaaattaatgcaaccaatagtaacaccagccaacttttatggacggttttactgccagccagggtggcaaccccatgaagtaggtgctgttatgccctttacttcacaggtgaaaaaactgagaccagcagaggccaagtggcttgtctatgatcaccagctagtagggatttgaatccagccagcctagctccggaattcctcattttaacctctagatcagctctgtccaataaaaatacaattgtggctgggtgcggtgactcatgcccgtaatcccagcactttgggaggccaaggcaggcggatcgcttgaggtcagaagttcgagaccagcctggccaacatggtgaaaccccgtctctactaaaaatacaaaaattagctgggcgtggtagcacgcgcctgtaatcccagctaatttggaggcttaggcaggagaattgcttgaatccgggagggggaggttgcagtgagcagagattgcaccactgcactccagcctgtgcaaaagagtgagtgagactccgtctcaaaaaacaaacagaaaaaaaaaattgtgaaagttgatcatgtgaattggatccttcttgtcatatccaactaaaacaaagttgagaggccggggggaaaacacttagggcagataccattgctccaagaaagtgattctctgcaagcctggctgttaaaactgcctgttgtaacctggaagcagtctaactggtactgaaaaaacctgccgtgactctaagactagtttttccctctgctgtcacttaccagtcagaacttgccagctccccagaacgttgctagtgtcaatgaactttcttgcaaaacaatacctaacatttctgtttcttataaaaacctctaacctctttgttctttgaaagttctgaagaccgcctggtctgtgtggatgcctcgaatgtcaattcttgcttcccaaataaaacattttattatttttttgagacagagtctcgctctgtcgcccaggctggagggcagtgatgcaatctcgtctcactgcaacctccgcctcatgggttcaagcgattctcctgcctcagcctcccgagtagctgggattacaggcgcatgccaccatgcccagctaatttttgtatttttagtagagacggggtttcaccatgttggccaggatggtctcaaactcccgacctcaggtgatctgcccgcctcagcctcccaaagtgctgggatcgcaggcatgagccaccgcaacaaaacattttaaatcgagagatttgtctctatatctctatattttatttggcttcgacataacgtgagctgtatacatagtttaagacatcaacaaacaaaaccagacatggattcttccccacaaagaacttaccttctagagggagagacatgataaacagttggcataatgagcaaattacgtagtatcagggaaataattaaatataaaacctccaggccgggcatgatggctcacgcctgtaatcccagaactttgggaggctgaggcaggcggatcacttgaggtcaggagtgtgagaccagcctggccaaaatggcgaaactccgtctctactgaaaatacaaaaattagccgggcatggtggcgcatgcctgtgatcccagctactcgggaagctgaggcatgagaatcacttcaacaagggaggcagaggttgcagtgagctgagacctcaccactgcactccagcctaggcgacagagtgagaagctgtcttaaataaataaaataaataaaacctccttttgaccctcttagaatcctctccacaaatgcagaaaagaattaaatgggtcctggcatgggggctcacacctgtaatcccagcactttgggaggccgaggcaggaggatctcttgagcccaggagtttgagaccagcgctggcaacacagtgaaaccccgtctctacaaaaaatttaaaaagtagctgcaaatagtggtgtgcacctgtagtctcagctacttgggaggctgaggtgggaggatggcttgagcctgggaggttgaggctgcagtgagctgtgatcatgccactgcacttcagcctgggctacacatcgagaccctgtctcaaaaaaaaaaaaaaaaaaaaaagaaaaagaaaaagaaaacaagtaaaaaaaagaatgaaacggttgtattagtgtatacacttcaaactagcctgtaatgtgcttctgtcatgatgaacagtaaacataataagtgtgtgtgtgttaaaaagtgattagtgctgtgaaaaattagagcagagaagggaaatggggcataacgaggctgggttgggtggataggagagggagaccctgaattaggagagatggatgaactattatgctggtctaatttcttctcaatatgtatattttcatttttaaaattttgtttcaactggacacggtggctcacacctgtatcccaacactttgggaggccgaggcaggtggatcacctgaggtcaagtgtttgagaccagcttcaccaacatggtaaaactccgtccctactaaaaatacaaaaacctaggtgcagtggcttatgcctgtaatcccagcactgtgggaggccgaggtggcagatcacgaggccaggagttcgagaccagcctggccaatatggtgaaaccccaactctactaaaaataccaaaaaaaaaaaaaaaaaaaattaggtgggcatggtggtgcgcacttgtagtcccagctactcaggaggctaaggcagaagaatcacttgaacccaggaggcacaggttgcagtgagctgagatcccaccattgcactccagcctgggcgacaagagtgaaaatttgtctaaaaaaaactgtttatatatatatatttgagaccaggtctcactctgtcgtagctcactttagcctcaaactcctggagtcaagccatcctcctgccttagcctctggggtagctgggactaaaggagagacaaggtcttgctgttgcccagggtggtctcaaactcctgagctcaagtggtcctctcgcctccacctccccaagtgctgggattataggcatgagcaactgtgcccactaaaactaatatattagttttaatgtaatatataagcagtgggaatcttgttgataatgagatatgatgactcaagtatttgacttttttaaaaacttttttcactttgtcatccaggctggaatgcaatggcttgatctcaaactcctgacctcaggtgatcctcccgccttggcctcccaaagtgctgggattacaggcatgaaccactgcacctggcctgattttttttttaacagttaaaaggtttaaaaagtttgagtaggttggccagggactgtggctgatgcctgtaatcccagcacttttggaggccgaggcaggcagatcacttgaggtcaggagttcgagaccagcctggccaacgtggtgaaaccccatctctacttaaaataaaaaaattagctgggtgtggtggcacacacctatagtcccagctactcaggaggctgaggcaggagaatcgctcaaacctgggaagcggaggttggagtaagttgagattgagccactgcactgtaacctgggtgacagagcaagactccatctcaaaaaaaaaaaaaaaaaaaaaaaaattccaagtaggtcaaaagggcagatactgaaaagtcagtgtccttttccagtccctggttctcctcccaagggcaagactcttggtgtccaccccaaagacaccacacccagacaggattcacccatctctctgagggctgctacctgagagactttatctgcaaataagatgacctttgttcttagtgcagttctgcccttcaccctaccttagcttgtcaccaccatggtccagaagcctcctagcccctatctatttctgtatctcaaaatgctatttaagcttcaaccatctggaccttctttgaatctcatactttgtggggtttctctgtgtgtgcacataatggatttgtgtgccttttctctagttcatttgtctactgtcaagtttatttcagagactcaaattatcaagccttcagagacggtggatggaaagtttcacttgtcccttcacttgttaaaaattttataaagttcttttgagatgaagtctcactctgtcacccagtttggagtgcagtggtgtgatcctggctcactgcagacttgacctcccaggctcaagccatcctcccacctcagcctctcaaagtgctgggattgcaggcatgagtcaggtcactgcagctgtgacctcccagcctcaagtgatcctcccatctcagcctctcgaatacatgggattataggcacagctatagtcccaccatgtctgggtaattttaaaattttttttgcagagatggggtcttgctacaatgtccatccagtctcatctcaaactcttggcctcaagtgatcctcctgccttggtctcccaaagtgctgggattacaggtgtgagccatcacactggccttgtccctatactttatagccagaaaagggctgaggaaagcagaaacagagaacaaaaaaacggattggcactttcaaaattaccttccttgtaatggataaagcagagttgttcttcagttcagcaaaccaggaaatctcttaattcaggagggccagctgtgggttttatggagctgttgcttcagagactccacacagagggggaaatgttctagagatataccaaaccccctggggattccaaatcatcaggcccacatttgtaacaaactcccagaagatgccaaagcctatgctcccaggacgaagcattgagtagctgaatcttacaggaatcaagccaaacatcccttgcatgttgatacacatttttttttttttgagatggagtctcgttctgttgcccaggctggagtgcagtggcacgatctcggctcactgcaacctccgcctcctggcttcaagtgattctccttcctcagcctcccgagtagctgggattgcaggcacacgccaccaggctctgctaacttaaatttctctccttttatttcccctttaccttatagttagggcattttggagctaggttttattatctaagtgtttcatttcaaggtaagaaattatttgctatacatcgggagcactggctctgatgaggttgagcaacactgatgcaaagcaaacgtgagtgggggctgcagtcttctctctctgctaggggtgtgggtgggaagctggggaaagtcctgctggtccagtttgcagaagtagaaatgtcatggacctccgggaacagagaagtgggctgcacgactaattccaagggtgttagaggttccaccaatgcggctttctggactacagctctccctggaggccattgttaacaggattagagtgaggtaggaggcgggactcgactccagaggcgtggcttggacaccagatcagactgaggacttggtagaacagggcggtggaggacagcaggagggtgggaagcagttttatttatttatgtatttatttatttatttgagatggagtctcgctctgttgccgggctggagttggtcggctcactgcaacctccgcctcccaggttcaagcgattttcctacctcagcccctcgagtagctgggactacagtcatgtgccaccacgctcggctaattttttgtgtttttagtagagactgggtttcaccgtgttagccaggatggtctccatctcctgacctcgcaattcgcccgcctcagcctcccaaagttatgggattacaggcgcgagccacggcgcccggccagctttctattattattattattattattattattattattattattattattaagacagagtcttgctctgtcggccaggctggagtgcagtggtacaagctcagctcactccaacctctgcctcccaggtgcaagcgattctcctgcctcagcctcccgagtagctgggattacaggcgcaccccaccacacctgcctaattttgtatttttagtagagacggggtttcaccatgttggccaggctggtctcgaactccagacctcaggtgatccactcacctgggcctcccaaagtgctgggattacaggtgtgagccactgcgctcagccggaaacggctttctatgagacaggcccaccagtgtgccatgtcaatttactatcgccatggcaacaccacgagttactgcccctttccacagcaatgacccaatgattactcctccttccctagaaatttctgcatgaaacgccccttaatctgcatgcaaaattaaaagtgggtataaatatgactgtggaactgccctgggctgctactgcctgcctatgaatagccctgctctgcagtagcgaccaccgagctgtgacactgccacttcaataaagctgtttcttctacctctggattgcccttgaattctttcctgggtaggccgggcgtagtggctcatgccttattcccagcactttgggaggctgaaggggaggtggatcatttgaggtcaggagtttgagaccagcctggccaacatggcgaaaccccatctctactaaacatacaaaaattagccaggcatggtggtgcacacctgtagtcccagctactcaggaggctgagacaggagaatcgcttgaacccaggagatggaggttacagtaagccgagatggcgtcacactgcactccagcctggttgacagagcaagactccatctcaaaaaaaaaaaagaaaaagaaaaccttgacaaatagagccagggaacgccataaagacagagttctcatgtttatacgcctgataacaaaaatgattacaaaagactctacagaaaccataaacttgcccaaagggcattacaactttacacaaaaaatggttctacaaagccctccgtggaagagctgcctgtctgacctcgaacgggcatcaccctcgattttgatctttgtagtcaaggataattatttcaaaacaattatgtactcctcattttttcttgtaagagcctttgtcttcctttaccttcctgaatctgcacatagttcactatggcatgcagattctcattgcagtgctgtattcccaaacaaacatcttttctctctttttttttgagatggaatctggctctgttgcccaggctggagtgcagtggcgcaatctcggctcactgcaacctttgcctccccagttcaagtgattctcctgccttggcctcctgagtggctgggattacaggcgcccaccaccacacccaactatttttttttgtatttttagtagagatgggatttcaccatgttgatcaggctagtcttgaactcctgacctcaggtgatccgcccacctcagcctcccaaagtgctgggattacaggtgtgagccaacgtgcctggtgcaaacatctcttcttttatagaacctctctctgtttgttaattaggttcacactgcagcctcaatctccctgggctcaggtgatcctccagctgagcctcccaagtacctggaactataggtgtgcaccaccatgcctagctaagttttttattttttgcagagacaaagttttgctatgttgcccaggctggtcttgaactcctgggctcaagtgttctgtctgctttggccttctaaattgctaggatataggcatgagtcactgtgcccagctagcttctttttctcttcttcttctttttcttgtgatggagactcgctctgtctcccaggctggagttcagtggcatgatctcagctcactacaacctctacctcctgggttcaagagattttcctgcctcagcctcccaagtagctgggattataggcacccaccaccgtgctgggctaattttcgtatttttagtagagatgcggtttcaccatgttggccagagtggtctcaaactcctgacctcaagtgacccactcacctcagcctcccaaagtgctgggattacaggcatgagccaccatgcccagctccagctggcttcttataattataaaaactaaatattttggagtctattaatacacgaaaattatgggaaaacatgtttgtaaagttattaaatgattttcgtttataaaatactcatatgtgacaggcaatgcaatatttcttgcttcccaggttttcactaaaatttaaggttactgtattagtccgttctcaagttgctatgaataaatacccaagactggataatttataaaggaaagaggtttaattgactcacagttcttcagcatggctgggcaggcctcaagaaacttacaatcatggcaaaaggggaatcaacatgcccctcttcacagggcagcaggagagagaagtgctgagcaaaaggggaaaagccccttataaaaccatcaggtcttggccaggcgtggtggctcatggctgtaatcccagcactttgggaggccgaggcaggcagatcacttgaggtcaggagttcgagaccaacctggccaacatggtgaaaccctgtccctattaaaaatacaaaaatgagccaggcatggtgggacacacctgtaatcccagctacttgggaggctgaggcaggagaattgcttgaacccaggagacagaggttgcagtgagccaagactttgccattgcactacagcctgggtaacaggtgatagagccagactcctccaaaaacaacagcaacaacaacaaaaggtgaaagcatttgctttttctcctcacttgattcctccaaaatctggaaactcttcgtgagtattcttatttttatttacataagttcagaaaaagtctgccctttctttataagcaagatataatagaaaacactggctatatcaccaaggctttgactgaagtgtcatattttattttaattaattaattaattaatttatttattgagaccaagtttcactctgttgcccaggctggagtgcagtggcacgatctcagctcactgcaacctctgcctcccaggttcaagtgattgtcctgccttagcctcccgagtgctgggatcactggtgtgcaccaccatgcccagctaatttttttttttttttgtatttttagtagagacagggtttcaccatgttggccaggctggtctcgagctcctgacctcagatgatccactcaccttggcctcccagagtgctgtggttacaggtgtgagccaccatgcctggcctgaagtattatattttaaaatatacataaatgcctggcttcaagagttcccagtcttacaatgaatgagtaaaaatggcccctttctggcaggcccaagaaccttaagaacctgttggtaaaatctaaagtctgccttggtttggcttctgagcctcaagaggtttctaaatctgagattcctatatgataaatgtggagagaaaaagttacatttctaaagaaaaactataatatacctattaatagattgcagccctgtgcactgtttttaagttcttgttatctacctatagactggacgagttcctgaattctcctgacttcctccaatatattgctacaactctctgactaaaagcaacggctggatgggcgaggtggctcacgcctgtaatcccagcgttttgggaggccgaggtgggcagatcacttgatattgggagttcgagaccagcctggccaacacagtgaaaccccatctctaataaaaatacaaaaattacccaggcttggtggcatgtacctgtagacccagctattcgggaggctgagacacgagaactgcttgaacctggaaggtggaggttgcagtgagctgagattgcgctgctgcactccagcctgggtaacagaaaaaattctgtctaaataaataaataaataaagtaaaagctgctctgtttccaaagccctatacgctgaaatgagaccaattttaaggaacaaactttgtgcccaatgtatgggccacacaaaagctcaccaaactgtctgacatcatgaccaaagacacacaaagtgaaaatcagaagttgatgttttcacactgcagacagcttttcccaagacatttggaagaagactaactcataataagatttgtaccccctcaatgctatctttttcatttggcaggataatgatgtagttgaaatttcatgaccaatagcttccattggcaacttaacaaaacctaacttaagaaatcctttagtatccattggttaactaagacatgtctgcgctattgctaatactacatgctgtacctgtagtacaggccagttcttccgggaaaagttgagatccatatacataaaagaagaaaacagatcacttggttacagttggtctcacctaatttcctaaggccttttgattcattcaattcattctgtaagcctatgaagttgtctgaaagcattatgaagagtggaattttcatattactactaattttactttgtatttctccattttaaaaccctgtatgtgtaattcgagcactttgtggggctgaggtgggaagattgcctgaggccaggagttcgagaccagcttaagcgacacagccaggccccatcgctagaaagaaaaaagaaaattagctaggtatagtggcatgggcctgtagtcctggctacctggcaggtgagcaggaggatcacttgggcccaggagttggatgctgcagtgagctaggatcataccactgcactccagcttgggcaacaaagcaagatcctgtgtctaaaaaacaaaacacaaaaccaaacaaaacaactttgtatgttgttaaatttttgcattaagtacaactcctaacaaaataatgttggcctaacattttgagatgttaataaaagactacagaacagataaaactgaacttaataacggacaccatgaaaacttagtctgagagccactcccgtcacacttcccttgttgttcaaatatgttgtttttttcagttccttctcaggctttagattaaaagggttttgaggctgggcgcagtggctcatgtctgtaatcccagcactttgggaggccgaagcgggcggaccgcttgaggtcaggagttcgagaccagcctggccaacatggtgaaaccccatctctactaaaattgcaaaaattagccaggtgtggtgatgtgctcctgtaatcccagctacacaaggctgaggcaggagcatcgcttgaacctgggtgatggaggttgcagtgagccaagattacgcgactgtactccagcctgggcgacagagtgagtgagactgtctcaaaaaaagaaaaaaaaaaaaaggagaggggttgatagggttttgatactgacttctagacaccagtcactcccccacaatatgcattgagatcagcaattgggacaggtacatcacagcatcaagatacatcaaaacccaaatacaggatgatcaatcagtgatgcttttggagaaagatcttaatcaaaaaggggaaaggtgaaagttgtcagagtcactatggagtcactaatattaagaaaaccctgaaaaacagagctggggaaggccatgaagagagggttctcacacttgtgtggctgattataaaactatcacaaaagactgcaaaaaccacaaccttggccaggcacagaggctcacatctgtaatgccagcactttgggaggctgaggagggaagattgcttgaggccaggagtttgagaccagcctgagcaaaatagcaagaccccctgtctacaaaaaaatataaaaatcagccaggcatggtggcatgtgcctgtagtctcagctagaggcgagaggattgcttgagcccagaaggttgaggctgctgtgagccaagatcatgctactgcactcctgcctgggcaaaagagcaagactctgtctcaaaacacaaaacaaaaagcacataaaacaatgctatacagtgtaataattttggaacaacaatatgtagaaaaaggagaaaataacccaatgtatatcatttatgggagaggagagtcttcccagcaaggctgagctgacctttgaagcaagaacagatgaggcagaaggaaataaggacttttgaagtcattagttctgcccatcaaatatttccagctggcagcaggatgcggtggtgtgtgcctgtaattccaggtacttgggaggctgaggcaaggggatcacttgagcctgtgagttcgagaccagcctcagtaacatagcaagaccccattaaaaaaaaaaaaaaaggaaaaaagaaatcagaagtagaaagtcaggtgcagtggctcactcctgcaatccctgcactttgggaggccaaagcgggtagatcacctaaggtcaggagtttgagaccagcctggccaacacggtgagaccccgtctctactaaaatacaaaacttagccaggtgtggtggcaggcgcctgtaatcccagctacttgggaggctgaggcaggagaatcgcttgaacccaggaggcagaggttgcagtgagcctagatcatgccattgcactccagcccgggtgacaagagcgagactccatctcaaaaaaaaaaaaaaaaatttcttcctgaattaaacgtgggctgtcacctttattcccatagccaggcaatgatttcctgacatggcccgtaactgtcctcacgtggcagccccacacagaagctagttaaaatgaaaccatggccctgcgaggaagtgccatcctccctcacattccacaagcatttgctgagcaccagctttttgccaggctttgggttaggcactggggacacaacagtgaaagagaggggtaaaatgtctgctatccaggaactgatgttctatagcataaaacaggcagtaaggaaggatgtaaataagtagaacctacaagggtggtaagtgctatggaggcagaaagcaaactaagccagggaggtggtaggaagagggggagggagttgtaagtttcaggcagggcacccagggaaggcctctctgagaagctgacgtttgagctgagatctggcggggataaaggattaagccagactgaggtaggagaccagcaggacttgttttctggtcacaatcttgctgaccaaaacaggatctggtccagacgggatgaagtaaagaaactggcaggaaccagccgacccctaggcagcaatccctagctgctctcattgtctattagcataagacactcccaccagagcatgacagtttacaaatgccatggcaacgacctggaagttaccgccccttttctaccaggaagttatctcccatttcacacagttctaaatgacccaccctctcaatttgcattaacccaccccctaatttgcatgtaactgaaagtgggtagaagtgagtgtaaatagttgccaacagctcatatgttgtctactctgggtgcactgcctatgagccggttctgttctgcaaggagcagcactgttctatgaaagattgttgtcaaacaccacgggctcatccttgaattccttcctgggtgaagacaagaaccctcccaggctaagccccaattttgatgctttcctgtccagcatcaagatcactatctggggaaggagtgctcttagaatagagaacagcaagtgcaaagcccatgaggcaggagcaagggacaagaaggccatggggctagagccaaggggagattggtaggaaatgcactttgagaggtgatgggggcagactgtgggggctttgtggtctgtggtaggaacttacttttcctctgagtgagatgcagccatgggagggtttgaagtagggatgttatctgattcaggcattgtgatattgtgatttacaataagatatatgtacaattggctgggcgtggtggctcggtgggaggccgaggcagaaggatcgcttgaggtcaggagttcaagaccagcctggccaacatcgtaaaactccgtctctactaaaaatacaaaaattagctggacatggtggtgtgcacctgtagtcccagctactcgagaggctgaggcaggcgaattgcttgaacctgggaggtggaggtttcagtgagctgagatcatgcctctgcactccagcctgggtgacagagctagactccatctcaagaaaaaaaaaaaaaaaaagaaacatccttatcatatcttgctggacaaaagtccaaggaacaccatgatgatatcctactggaacaagggccagaactgccttatcatgggagcgtcttatcaatatcctgctgggcagcaagccatactgcccagacccctcccacccatacctataaattgccccagcctgtaagcagtgatgggctctggcattaggctggtcccccacttctgtaagttttatgctggacataaagcctgtatttgatgtccagcccccccttctttctgtgtatctttctttaaccctcaccatcgcttcaaaacctaacaaagacgggttctcactattttgccgaggctggtcttgaactcctgagctcagccgatcctcctgccttggcctcccaaagtgctaggattacagcagtgagccacagcacctggcctgaaatttttttaattaattaattattttgtagagccacgatcttgctatgttgcccaggctggtctcaaactcctgacctcaagtgagccgcccgtcttggccttcctaagtgctgggattacaggcatgagccaccacacccagtgagtgtcagaactgaactgaatgagaaaacacccaagtggtgtctgctgtcaaattgcttggtgtgggacagaaaacccccctatacacccagagtccctgaagtattctgtgttgtgagaatacagcaggagaaactggatttgtttttcttgtgtggggggacaggaggaagtaaggaacagagaaagaaggatgctgctcagagacaggtgagacaggagggtggaccagcccaggaccggggcataggagccaggagaagtggctaattctggatagatttgagggtgcccacaggatttgctgaagaattgggcatgggatgctgggccacacagaacacgttcaggatatcaggcgatgttttttgtgaagtccttgtctatagaaacagtttgattgaaagatgtggccaggtgtggtgactcacgcctgtaatcccagcactttgggaggatgaggtgggaggatcctttcaggtcaggagcttgagaccagcctgggcaacatgtagagagcccatctctatttttttaaaaaagggaaaaagcaatttaatttcttttttcttttttgactagagacagggtttagccatgttgcccaggctagtctggaacttctgggctccagggatctgcccaccttggcttcccaaagtgctgggattaccagcaccctaaaaaaaggaaaattttaaaaaaagaaaaatttgttacaaaattcatggacctaagtgaggtatagtgatttatcagtgatagagaataatgcacagagaagaggtacttaggtatttgctttttgttgaacccaccaccgtgaaatccaccaaagcgtccaggtaccatctcctcatgtcccttttttgtcatcctgtgtcattttgggctaatttaatatccctcagcatgcaaaagaggcagcattgctgttacactcaacatccttgcttctgctgatctttttttttttttgagacagagtcttgctctgtcgcccggctggagtgcagtggtgtgatcttggctcactgcaacctccgcctcctgggttcaagtgattctcctgcctcagcctcccaagtagctgggactataggcatgcgccaccatgcccgctaattttggtatttttagtagagacggggtttcaccatgttgaccaggatggtctcgaactcctgacctcaggtgatctgtccacctcagcctcccaaagtgctgggattacaggtatgagccaccgcgcctggccacctctgctgatctctatggctatctgtttaacactggtcacatcgttcctcatgacactgccccaggaggctgcttcatctgttgtgacatccatgaataccggcttctggtgacttcgtcagaggttttcttgggctgagtggatgacaaacacaaatgccaatgccaatctttattcttcttgtcagacagtaatgtgctgatgtcataagaaggcttaaaagggaggcgcattgtattactccgttttcacgctgctgataaagacacacctgagactgggtaatttataaagaaaaagaggtttaatggactgacagttccaagtgtctggggaggcctcacaatcatggtggaaggcaaagagcacgtcttatatggcagcagagaagagagagaataagaaccaagtgaaaggggagaaacccttacaaaaccatcagatccgccgggcacggtggctcacgcctgtaatcccagcactttgggaggccgaggcgggcggatcacgaggtcagaagatcgagatcatcctggcaaacacagtgaaaccccgtctctactaaaaatacaaaaaaattagctgggcgtggtggtaggcgcctgtagtcccagctgctagggaggctgaggcaggagaatggcgtgaacccgggaggcagagcttgcagtgagctgagatcgcgccactgcactccagcctgggtgaaagagcgagactccatctcaaaaaaaaaaaaaaaacccatcagatctcgtgaaacttatgcactaccaagagaacagtatgggagaaaccgcctcgatgattccatcatctcccactgggtccctcccacaacacatgggaatcatgggagctacaattcaagatgagatttgggtggggacacagccaaaccatttcacgcatctcacttaagagcatgaaaacccaatcatcaagtttacgaactacaaaaggatcaaatgcaagtcttttatttatttatttatttatttatttatttttgagatggagttttactctgtcacccagactggagtgcagtggcacgatcttggctcactgcaacctctgcctcccgggttcaaacaattcttctgcctcagtgtcttttaaaaatttttcaaatattttttagcagtggtgaggtcttgttctgttgcccaggccggcctcgaacttctggtctcaagcaatcctccagcctctgcctcccaaagtactgggattacagacgtgagccactgcacccagccaaaagcaagtttttgtttgtttgtttgtttgtctgtttgttttctgagacagagtctcgctctgtcaccaggctggagtgcagtggtgtgatctcggctcactgcaacctctgcctcccaggttcaagtgattctcctgcctcagcctcccatgtagctgggattacaggcgtgcaccaccacgcccggctaattttgtattcttagtagagatggggtttcaccatgttggccagattggtctcaaactcttgacctcatggtctacctgcctcggcctctcaaagtgctgggattacaggtgtgagccaccgcgcctggccccaaaaagttttaaccagagtaatgtgagcaagaacttttctggtcatgttaaatgatcatatttggaatttcctggtggaaatgtagaaccacacaccttccacccaagtctgtctttaggccaccatccccgcattcaaaaagccttttttttcttttttttttagacagggtttcactctgtcacccaggcggagcgatcgcagttcacctaagccttggcctcccaggtttaagcaattctttcacctcagcctcccgagtagctgagactgcaggtgcatgccaccacgcctggctaatttttctgtatttttagtagacatggcgtttccctgtgttggccaggctggtctcaaactcctgacctgaagtgatccacctgcctcggcctcccaaagtgctgggattacaggcatgagccaccacacccagccaagatttttaaaactttttacaattttatttttagagctgaggtctcactatgtcacgcaggctgatctcaaactcctgggctcaagcgatcctcttgcctcagcctcccaaagtgctgggattacaggcgtgagccatcgtgcctggcccctagagtccttcaacactgaccttgtcttagccttcaatatccctgcaacctgtgagaataagcaaagcaaatacagtgaccacgtgtctgtccctcctggagcccagctgtagctgaccggagagcatcgggtgcccatcatgttgtggagtcacggtctcgaaaaccctgggaggggagaggcacaatttgcccattatggagaagaaactggccagttcttcaagagcttgatgtctcttttcctggcagcaggagttacaggccatgaatactagtttctgtgggagaaataaaggaatctttgcagatggcaagggaaaaaaacagctcctttctaaaaggacattgcctgccagggacggtggctcacgcctgtaatcccagtactttgggaggccaaggcaagcagatcgcttgagctcaggagttcaagatcagcctgggcaacatggtaaaatcctatctttacagaaaaatacaaaaattagctgggcatggtggcacacatctgtgatcccagctactgggggaggctgaggcaggaggactgcttgagcccgggaggcagaggttgcagtgggtggagatcaggctgctgcactccagcctgggcaacaaagtgagactctgtctcaaaagaaataacaataataaataaaataaaataaaataaaggggcattgccttattgtaaatccaagtttactaagtaactagcctcagtctaaacactggggaaagtacaattctgagatgataggccgtttagatatgaagtaccagatgacatcctacgtgtatataatctgtattttggctgggcatgctggctcatgcctgtaatcccagcactttgggaggtcgaggcaggtggatcgctggaagccaggagtttgagatcagcctggccaatgtggcaaaaacctgtctctactgaaaacacaaaaattagctgggcatggtggcaagcacctgtaatcccaactacttgggaggctgaggcaggagaatcgcttaaaccctggaggaagaggttgcagtgagccgagatcgcgccactgcactccagcctgggtgacagagcgagactctgtctcaaaaaaaagaaaaaagaaagttgatacatggacccatctacctggctccacgctaagaggtggtcatggaccattgatgacccagtgtcctgaatgtgtcctgtgcccagggtacgtccagaagcttcgtggcagcaccattctggtggccgccagggggcgccatgtgcttgccaggcagcagtcctggaactggggtccagccacagggccccaggaccacgccacagggcaagagtcctagagttcctggtagtttccagctgaacctatgcacacggggtcgttggtggaggtggaactagatctctgcagagcaccctaaaggggagaaacgggacaggcccacacaggtcttggtctgaactgggagtaccctgccctgagagcactgtggcttggctggccccagctgctggagagggacttagaggaaagtgccacacagtgtaggatgcccacttgcctggtccaaggatgctcctggtgggtgtgagagaaacagcaaagtccagcatttccagacttggatttctccaaggtttccagtcatgttgccatttattgggaaggggaatggtgcaggactgggggaaggaataggaaaatcagggcttcattttggggaaactgaggctcagaaaagcccacaggcaccgagcaaggatgtgaaaccatttccctcgtaacccccgggcgacaccgcctgccccagttccacgtgaggttgtaaagcactgatgctgctgaacattttcataaatgacttcatttagtctcatcaacaatgagcattttgatcccatttagggggaacaaagggaggctcagaaagaccttgccgaggccttagatggaggaggtggcagattttagtgtgctctgagtccaggcccactttaggctcacagaaccacctcaacccctttctgccctaggccgggcttttccgagcctccctctgcccacttgcctcctccttccaggagtcagggtactggggggcttcccgcctgcgcccaaggggccatagggcctcattcccatccattcctgcctctgtgccttgctctaacccagctggccacagccccacctggcccaggtgccgccggccctgcttggtccccatacaaaggcctgtgggagaggctgggaaattgccatccacctggggacagtgggaaacagtcatcgtcagcctgtccatatccaggacaccgtgctgcatcctggctcacaatcaggaaccagaaggcagcacggcccccacagggctggcacgggcagcctcactgtggcctgtgccctgggcagtaccaggcagctccatcctgtggtacccaggctgagtccatctcttacgcccacgcccaacctctcagcaaacccaggcagctccaggtgcacaaaatctgcacagcacctgccctttctcgcccgaccatggccaccaccctggccccatccacccctgtctccatctggaccatcactcccatccacagactccctgctccttcccaccccaccctcgcaatctgttccacagccacagggagactgtgaacacctgtgtcactcctccgcccagaaccctcccggggtgccatcctgccctgagtaaagggcaaagtcctcccctacggcccaccaggcctcacatgatctgccccgccccactctgactctgtggcctcccacagcctccttgctcacccagcctggccactgcttattattctgttcccaccacggggactttgcttggctgcccctccccataggtcactccctaccctccttccaatgtttgctcaaatcttgccttcccagccaggcttcccctgaccactgcctttaatactttaaccaccctgcctttttttgaactcctaattttttatttttatttttattttttgagataggatctagctctgttgcccaggctggagtgcagtggcgtgatcatagctcactgcaactttgaactgctaggctcaagggattcctcctgattcaacctcccaagtagctgggactataggtgcacacccagcacttataattgtaatttttaatagagatggggtttcactatgttgcccagtctggtctcaaactcctggcctcaagtgatcatcccaccgcagtctcccaaagtgctgggattgcaggtgtgagccaccacacctggccaccacactgccctttttaccccctttgcctactctgattttcttggaaaccttccatagacttcacagcttcctctcaccatcccactcatccagccactggccatggccaccttccctgttactgtacgcaggctccaggagggctggtcagctcagcctctctgctggagtcctttattagtttcccattgctgctgtaacgaattaccacaaacttggtgccttcaaacacatttattctcttgctgctctggaggccagagtctaaaatcagtttcactgggctggagtcaaaggagcggaaggactgcctgccttctggaggctcgggggagccattcattgcctctcctggcttctggaggctgccagcattccttggcttgtggctgcatcactccaatctctgcctctggagtgattttgccttctcctcttctgtgtgcaacctccctctgcctctaatttataaggacacttgtgacagcatatatggcttaccaggtagtccaggataatctcatctcaaaaccattaacttggccaggcgcggtggctcatgcctgtaatcccagcactttggtgggccgagacagatggatcacctgaggttaggagttcgagaccagcctggccaacatgacgaatccctgtttctactaaaaataccaaaattagccaggtgtggtggtgcgtgcctgtaatcccagctacttgggaggctgaggcaggagaattgctggaacctgggaggtggaggttgctgtgagctgagattgtgccattgcactccatcctgggcgacagagcgagactccatctccaaaaaaaaaaaaaaaaatcattaatttacatctgcaaagacgcttcttttgtataacataacatttataggttccagggattgggttgctgtcttagtctattcaggctgctagaacaaaataccataaactgggaggtttaaaaaatttatttctcacagtagtaaagcctgggacattcaagatcaaggtgctggcagattcgctgtctgataagggccctgcttcctcatagaggaggtcttctccctgtgttcttacagagtggaagaggcaagggctctctctatggcctgttttataagggcactaatcctattcatgtgtactttgccctcttgacccaatcacctcccgcaggtcccacctcctaataccatcaccttgggggttgggatttccatatatgaattttgggggttttttctagagacagggtctctctctgttgcccaggctggagtcacagatcactgcaacctcaacctcccaggctcaagtaatcttcccaccacagcctcccaagtgtctgggacttcaggtgcatcccaccatgcctggctaatttttttgtagagatagggatcttactatgttagccaggctgaccttgaattcctgggctcaggcgatcctcctgccttgccctcccaaggtgctgggattacaggcgtgagccactgctcttggcctcagtatgtgaatttcagaggggatacaaacattgagaccatcgcatacctgaatatatttgggggtcgttattcagcctactgataatcaggtcctgactgatggtggttctaggagaacagagcctcagggaagctcatctgcagctggttctctaatctacagggcttaagagcatcatcaaccctgttgccatggttaagggggcactggtagttcacaacatgcagagacaaaatggtgacttatactgtgacctgtcgtcacctgtcatttacagggtcaggtccattctgcactggtctccctgttgagcaaggacggtggccattgtcagtccaggctccccacttccttgttctttttttttttgatagagtctctctctgtcacccaggctggagtgcagtggcacgatctctgctcactgtaacctccgcctcctgggttcaagtgattctcctacctcagcctcctgagtagttgggattacaggcgcccgccaccacgcccagctaatttttgtatttttagtagagatggggtttcaccatgctttccaggctggtctggaactcctgacctcaggtgatccgcccacctcggcctcccaaagtgctgggataataggcgtgagccactgtgcctggctgcttgttcttatcccttttttttttttttttttgagacaaggtctcgctctgtcactcagagtggagtacagtggcgcgatcatggctcactgcagcttcgaccgcctgggcccaagcaatccttctccctcagcctcctgagtagctgggaccacaggtgcacgccaccacccccgggtaggtttttccaattttttttttttttttaagatggagtctaactctgttgcccaggctggagtgcagtggcacaatcttggctcactgcaacctctgcccccaccaggttcaagtgattctcctgccttagcctcccgagtagctgggattacatgcacatgccaccacgtccagctaattttttgtatttttagtagagacaaggtttcaccacattggccaggttggtcttgaactcctgacctcaggtgatcttcccgcctcggcttcccaaagtgctgagattacaggcgtgagccaccgcacccggccgacttttacaaaattattattattattttgtagagatggggtctttctattttgcccaggctggtcttgaactcctggcctcaagccatcctcccacctcagcctcccagagtgctgggattacaggcatgagccaccacacccagccaacaaggggagccttaagtacagagcaaagtctcctggtagctcaccagccaggtggtggactggtattggggagtccaccccagtggggactcactgaagcagaccagtatgtgggaaaaccatggacatgacccccagatctaagagcagtggacactggggaagaccctctactcccactcaaccctttctccggtaaggacccaagagggcagaggcctaacccagcccccggcgttcatcctgattcatccaatgagtctaatcttctgtggtgtgacttgttcaggaatgggcatccaacctagttctggccaatggggtgcaaggggaggaggatgttctgaaaaagtgtagaaaaaagaggatcacagatctaaggtttgtagtaagagtctgtggtttccagaatgacatggaagaaggaatgagggaggacacctacaagttagatgatggctacaccccaagacttcagaggtgtggactgaaagccacaaaagaaggaagtaaatggtcagataatgcatttcctttaggaatgtaagtcatgaggccagctgaccacggtgaaatcttacattgggaaatagtgtgggctgttgacttgacaatggagccataggttagccgccattttgcagagctatctgtgaaggtgctgatgacactcttgaaaggatcccagtactggtcgaaggtgaagacacaggaatccatcatgtggtgagattctaacttcatccctaactggcggtctacattacgtgtagatctgtttactaaggcagttgatctcttctttggcgtgtctttgaaaggggttttctcattccttatgttaccaaataaaggaggtgtttttattgcactctccaggaaggacaagtggaggaagaacagctgcagtttgtctctgtccctcatgccttccctgggggtgacggtgggggaggacccatggtttagtggaacttattcttgtgcctataaaccagctagagaggagccgccattatttatgtatttatttagagatggagtcttgctctgtcacccaggctggagtgcagtggcgagatcttggctcactgcaacctctgccttctgggcttaagcgattctccttcttcagcctccctcccaagtagctgggattacaggcgtgcgccaacatgacttgctaattttttttttttttgtatttttatttttatttttttttgttttttattattatttttttttaatttatttttttattgataattcttgggtgtttctcacagagggggatttggcagggtcatgggacaatagtggagggaaggtcagcagataaacaagtgaacaaaggtctctggttttcctaggcagaggaccctgcggccttccgcagtgtttgtgtccctgattacttgagattagggattggtgatgactcttaacgagcatgctgccttcaagcatctgtttaacaaagcacatcttgcaccgcccttaatccatttaaccctgagtggacacagcacatgtttttgtatttttagtagagacgtggtttcaccatgttggccaggctggtcttgaactcctggcctcaggtgatcggcccatcgtggcctcccaaagtgttgggattacaggcatgagccactgcacctggccaaggagcctccattttagatggtaagttcaatttgggggtgttgggaagcccgctgcggccacccagctaagcctttaccaacaggctgatatatatttttttaatttttaatttttgtaggtgtacttatttatggggtaaatgaaatgttttgatacaagcatggaatgtataataatcacatcctggagaatggggcatccatcccctcaagcatttatcctttgtgttacaaacaatccaattatactctttcagttatctttaaataggcgagttattattgactataggcgccctgttgtgtgatcaaatagtaggtcttattcattatttctatttttttatacccactaaccatcctctcctccccccaacctccactatccttcccagcctctctatgtccatgagttcaattgttttgatttttaactcccacaaataagtgagaacatgtgatgtttgtctttctgaacctggtttatttcacttaacataatggtctccagttccattcatgttgttacaaatgactagatctcattcttttttatggctaaatagtactccactgtgcatatgtacattttccttatccattcatctgctgatggacacttaggttgcttccaaattttggctactgtgagcagtgctgcaatacacatgtcagtgtagatatttccttaacagatacactgatttccattctatggggtatatacccagcagtgggattgctggatcatatggtagctcaaatttttaggtgttttgtttttttttttttttttgagacagagtctagctctgtccctcaggctcaagtgcagtggtgtgatcttgctcactgcaacctctgcctcccaggttcaactgattcttctgcctcagcctcctgagtagctgggatgacaggcatgcaccatgacgcctggctaatttttgtatttttagtagagacggggtttcaccacattggccaggctggtcttgaactcctgacctcaagggatccacctgctttggcctcccaaagtgttgggattacaggtgtgcgccactgcgcccagcctcaatttttagttttttgaggaacctccaaactgttctccacggtggttgtactaatttacattcccaccaacaatgtacgagggttcccttttcttcacatcattgccagcatttgttattgcctgtcttttggatataaggcactttaattggggtgagatgatatatctcactgtagttttgatttgcatctctctaatgatcagcgatgttgagccccttttcatatgccaataggcggatatttctagctgtctgtgtgattcctgggtctacttctccaaaatcagactggaagcagagaggcagtgtggagagcagataagagtcagggctctgctgccagactgcccgagttcaaatcctggctccacctctggctcactggggggactttgagcatgccactcagtctttctgacctcagtttccccctgtataaaatggggatgataatgctacctatctcatagggttgtggagaggaccaaatgagctagtatggggtatttcatggatccacggaattgggatgggtgttaaaatagatgatctgttgtggtttaatcaacagtggtcttttttgcttccttttttttttttttttttgagatggagtctcactcttgttgcccaggctgcagtacagtggcgcaatcttggctcactgcagcctctgcctcctgggttcaagcaattttcctgcctcagcctcctgagtagctgggattacaggcatgtgccaccacgcccggctaattttgtatttttagtaaagatggggtttctccatgttggtcaggctggtctcgaactcctgacctcaggtgatccacctgcctccgcctctcaaagtgttgggattacaggcgtgagccactgcgcctggccttttttatttttatttttattttttttttagatagagtcttcctctgtcgcccaggctagagtgcagtggcacgatctcggctcactgcaacctccgccttccgggttcaagtaatcctcccgcctcagtctcctgagtagctgagattacaggtgtctgccaccatgcccagctaatttttgtctttttagtagagacagggtttcaccatgttggtcagggtggtctcaaactcctggcctcaggtgatccacctgcctcggcctcccaaagtgttgggattgcaggtgtgagccactgcacctggctgctttatttttttctttctaagatggctcttatgcacagagcaccttagagttggtgtaatagggcacatgggaaggctaagagcagtgcttgtagcacagaaagtagcatgtgactgttgatcagtatcattactgttaattcccctcaaacaccccacagctccctccgctctcttgagggagtcccgcagaaagacagcttctctctctctctcattctgtctttctctctcccttgcctctgctgaactcaaacaagaaagcgtgttgcagtggtgttggcagcctttcacttacaaccttatcttcaggatgaagataaaactagatagagattgcagagcagagaaacgggaacccaggatgccaatgacatcagtgagcatctggacagactacacatcttctgtgggtttcctgttacttgcagcccaaagcattcatatgtggagtgtgtgtgtgtgtgtgtgtgtgtgtgtgtgtgtgtgtgtgtgaaatgttctcctgaaagcactggggggtttctgagacttctgaacatgggctatctttactagtgttttttcaggcctgtctcccactcctgagccccctaagccagtattctctccaacaaggcctctttccctaccccatgctacagatctctgggaagctgagcccagtggtctgattgacaggtgactccaagatgttgcttgttcaaagatgctgagatctctctggaaattgtcactaatttccacttaggacagcatttcccaaagagtggaatatgctagtgagatttgacacatttaggtggtacacaaaacatttgttatgtgaatagctctgtgttttctttttttcttttttagagatagggtctcacactgtcacccaagcttgagtgcagtggtgcaatcttggctcactgtagcctcggcctcctgggctcaagtgatcctcccacctcagcctcccaagtagcttggactacaggcacacgccacagtgcccagctaattaaaaaacattttttttttttgtagtgatggggtcttgctatgttacccaggctggtcttgaactcctggcttccatcaatcctcctgccttggccttccaacatgctggaattacaggcatgagccactacacccagcccagctctgggtgtacaggcgcctgggtgttttttttttttttttttttttttgagacagagtttcactcttgttgcccaggctggagagcaatagctcgatctcagctcactgcaacctctgcctctgggttcaagagattctcctgcctcagcctcctgaatagctgggattacaggcgcccgccaccatgccggctaattttttgtatttttagtagagatgggctttcaccatgttggccaggctggtctcgaactccagacctcaggtgatccactcgcctcaacctcccaaagtgctgggattacagtcgtgagccaccacgcccagccctgtattttctttgaaaaagtattaaatgattttggttttctctttatagtagtgatacaatgttgccttcaaaatgaattaagcctaaacattatttaaagaaattaagtaaataagagtttaagtagtccttgaataggacaaaaaaatctcaagtggtatgtgagccactgaagtttgggtagcttggttttagagaaaccctgcactattttttttccccctggcgacggtccccagtttgtctggcctgggggtgagactcgctcttctttcttgggtttgcttttcaaatgcacagagcagggcactcagccgacaacatgagggctgacggttgtcaccaagcagcgatgtctctccactgggagcctttaaaaaggctacacttggcccggcgtggtggctcacgcctgtaatcccagcactttgggaggctgaagggggcagatcacctgaggtcaggagttcgagaccagcctgaccaacatggagaaaccccgtcactaaaaatacaaaattagccgggcatggaggcgcatgcctgtaatcccagctactcgggaggctgaggcaggagaatcgcttgaacctgggaggcggaggttgcagtgagcccagatcgcgccattgcactctagcctgggaagagcaaaactccgtctaaaaaaattttaaaaaggctacacttgcagtgatttaaaataaactgaggcttttaggaaatctctgctgaagcggctcctgcttcagcagaaacacctgtgtgttttaatgctgaggatgggcggagtatggagccttgggcagagtacggagccttcggtgaaactgcggactgggagagacctggaccagttacaagctgtgtaatatcagacaagctacctgtatttgtctgttctcgtattgctataaagaaatacctgagaggcccagcgtggtggctcacgcttgtaatcccagcacttttgaggccgaggtgggcagatcatttgaggacatgagtttgagaccagcctgaccaacatagtgaaaccccgtctctactaaaaatacaaaaaaaaaaaaaaaaaaaattagccaggcatggtagcgggcgcctgcactcccagctacttggaaggctgaggcaggagaatcacttgaacccaggaggtggaggttgcagtgagccgagatcgcaccactgcactccagcctgggtggcagagtgactctgtttcaaaaaaaaaaaggaagaaatgtgcccaggccaggcgtggtggctcacatgtgtaatcccagcattttgggaggctgaggcaggagaatctcttgatccagggagattgaggttgcagtgagctgagatcgagccactgtactccagcctgggcaacagagtgagactctgtcaaaaaaaaagaaaagaaaagaaagaaagaataaataaataaataaatatgccctggggcggacgcagtgactcatgactgtaatcccagcactttgggaggccacggtgggaggatcacttgagcccaggagtttgagattacagtgagccatgatcatgccactgcactccagcctgggtgacagggcgagaccctgtctcaaaacaaaaaaacaaaattacctaagcccaacatggaactccattatactcataaccaggtttgttgtcgtcgttgttagagacagggtctcgctccatcacccaggctggagtgcagtggtgtgatcatggctcactgtaatctcaaactcctgggctcaagcgatcctcccaactcagcctcccaaactgttgtgattacaggcatgagccaccgcaccgggcccgtaaacagttttaaatttttcaggaatgcaactactgggtagaaccaggaatgtgtgttcattgttcaccatttggtgccagagtcacaaagctgtgtctgtctttatttgtggctctccagctggcattcacaaagcttctgcccctggcacacccctaaccctttattatgttttatagcttagttaagtctgagctttttgaacattttactataaattactttccgcttattctttcttcattataataaggacattatcttgattaaaaattttattttgtatgtgggtgggttatattatccataaactttatttcagggtggtaaagggagcatataaaatatttattataacactaatctatgctaaaaatcaaaacagccgttacccctgggggtggggggcgggcggtaagaggattgactgcaaaagggcacaaaggaatgttctggagagaaatgttctctgccttgattgaggtggtgtacaattgtcaaaactcatccaactgcacacttaaagtgggcgcgttttaccgtaattataatgtaaattatacctcactcgagtggaataaaacaaattttaaaatatctgcatagaaactttaaaagtatagatttggccaagcatggtggctcaggcctgtaatcccagcactttgggagggcaaggtgggtggatcacctgaggtcaggagttcaagaccagaccagcctggccaacatggagaaaccccacctgtactaaaaatacaaaattagccaggcgtggtggcgggtgcctgtaatcccagctgtctgggaagctaagacacaagaagcgcttgaactcgggaagcagaggttgcagtgagccaagatcttgccactgcactccagcctgggcaacagagcaagaccctgtctcaaaattaacaaaaaacatagacttgttctagaaagcagatagagatctgctaaggccttgaaatcaattaagtggatttagaccagcatttaaaaacaaaagcaaaaacagaagagattagaggctggcactgcccacattgtgagtcttgcacaagttatataaaacttttttttttttgagacagagtctcactctgtcacccaggctggagtgcagtggcatgatctcagctcactgcaacctccgcctcctgggttcaagcaattctcccacctcaccctcccgagtagctgggattacagatgcgtgccaccatgcccggctaaatttttttgtacttttagtagagacggggtttcaccatgttggccaggcaggtcttgaacccctgacctcaagtgatccacctgccttggcctcccaaagtcctgggattacaggcgtgagccaccgcaactggccaagttttgtaaactttaattatgtaatagatatacatatatgcatgtgtgctaggttgtgatataagtacatgtcttattttgaactgtagtcaaaaacattgaaaaaactaaaatggtacttgccagactttcaaacatagatctcttacctcttttgcagcaatgtctgagatatgattagatcatcatgattttatccgagaagactgacagtcagaagcttgtgtttgaaagaggattaaacgtggtagagtgagttctaataacagaaatcacagggatggggaataaaaagagtgttggggtgagagctgaatgctcatcgttcataatgatgtctatatttgatcaatccagaattaacatgacaaacctggaaaaatacttccaaattgcatcacatgcaaagggctaattttaatagatttcccacaaatgaataagaaaaggaacaatctcatcaggggaaaaaatacacagagaatgtgaacaaatagttcatagaaaaggaaataagaatggctcttaagtccgggcgccgtggctcacgcctgtaactccagcactttgggaggctgaggtgagtggatcacttgaggtcaggagttcgagaccagcctggccaacataatgaaaccctgtctccactaaaaatacaaaaattagtcgggcgtggtggtgggggtctgtaatcccagctactcgggaggctgagacaggagaatcgcttgaactcaggaggcagaggttgcagtgagccgagatcgcaccactgcattccagcctgggcaacagagcgagaccgtctttttttttttttttttttctgagacggagtctcgctctgtcacccaagctggagtgcagtggtgcgatctcagctcactgcaagctccacctcccgggttcacgccattctcctgcctcagcctcccgagtagctgggactacaggcgcctgccaccgcgcctggctaattttttgtatttttagtagagacggggtttcaccatgttagccaggatggtctcgatctcctgacctcgtgattcacccgcctcggcctcccaaagtgctgggattacaggtgtgagccaccatgcccggctgccacacacttttaaatgaccagatctcttgagaactcactcactaccaaggggatggtgctcacccattcatgaaggatccaccccatgatccaatcacctcccaccaggctccacctccaatgttggaaattgcaattcaacatgagattggtggtgatagcacctagactatatcggccacggtacctagagcataacgtgcagtgatgaaaaacaaatccaacagcttgtcaaggtcatcagtgacttccatggtgccaaatccaaagttcaattcttttttttttttttttttgagatgaagtccctctctgtcaccctctctgtccaggctggagtgcagtggtacaatctcagctcactgcaaccttggcctcctgggttcaagcgattctgctgcctcagtctcctctgtagctgggactacaggcatgtgccaccacacctggctaatttttgtatttttagtagagatggggtttcaccgtgttggccaggctggtctcaaactcctgacctcaagtgatccgcccacctcagcctctcaaactgctgggattacaggcatgagccaccgcacccagcctcaattcttattttcttttctttctttttttttttttgagacagtcttactcttgtcacccaggctggagtgcagtggccaatctcggctcactgcaacttccacctcctgggttaaaaagattctcctgcctcagcctcccaggtagctgggattacaggcacccgccaccactcccggctgagggcctcgtattataagaatatttgtgattgcatttggagcctacatggattatccaggatcatcttcccattttaatattcttttttttttgagatggagtttcgctcttgttgcccaggctagagtgcaatgacacgatctcagctcactgcaacctctgcctccagggttcaagtgattctcctgcctcagcctcctgagtagctggcatgtccgcaatttattccttctgatgggttcttggtcttgctgacttcaagaatgaagccatggaccttccttcggggtgagtgttacagctctttaagacggtgtgtctgaagtttgttccttcagatgttcacatgtgtctggagttccttccggtgggctcatggtctcactgacttcaggagtaaaaccgcaggccttcacagtgagtgttacagctcttaaaggtagtgtggacccaaagaatgagcagcagcaagatttattgtgaagagccagagaacaaagcctccactgtgtggaaaaggaccagagcaggttgccactgctggctccagtggccagcttttattcccttatttggccccgcccacatcctgctgatttgtccattttacagagtgctgattggtccattttgcagagtgctgattggtccattttatagagtgctgattggtgcgtttacaatcctttagctagacacagagtgctgattggtgtgtttttacagagtgctgattggtgcatttacaatcctttaactagacacagagcgctgattggtgcgtttacaatcgtttagctagacagaaaagtactccaagtccccactcgacccaggaagtccagctggcttcacctctcactgggattacaggcatgtgccaccacacccagctaattttgtatttttagtagagatggagtttctccatgttggtcaggctggtctcaaactcccgacctcaggtgatccacccacctcagcctcccaaagtactgggattacagacatgagccaccacccccagcctctgtttcttttttttgggcaccagtaatcccagctacttgggaggctgaggcaggagaatcacttgaacccaggaggcagaggttacagtgagccaagatggcaccactgcactccagcctgggcaacagagcgagactctgtctcaaaaaaaaaaaaaaaaaaaaagagagaaaaaaacctgagggtgctgttatagaaggtgcaaatgtgcaaatggccactgtgaacagccagtggaccctgctgcacctttcctcccctcccatcaacctcttttgtgcctccccctccgtgtaccaccttctctgtcaccaaccctggcctcacaactctctcctttgccactatcatcaacaaacaaacaaacaacaacaacaaaaacctcagacttctcaagaacaatactgcaaacaagatgagagaaaaatgcctttaaaattctgaaacaaatggagtttggtccctgaattctgtggccagtcaactatcaatcaagtcagaggagagtttgaagacattttcagacgtgtaaagtctgaaacgtttacctcccatgaccttgctcaagaagctccaggatggccaggcacggtggctcacgcctgtaatcccagcactttgggaggctgaggcgcgtggatcacgaggtcagaagttcgagaccagcctgaccgacatggtgaaaccccatctctcctaaaaatacaaaaattatttgggcatggtggtgtgtgcctgtgataccagctactcgggaggctgaggcaggagaatcgcttaaacctgggaggcggaggttgcagtgagccgagatcgcgccactgcactccagcctgggcgacagagcaagactccatctcacaaaaaaaaaaagaagaaaagcttcaggatgcactcaactgaaatgagagcaccaccaagaaaaaggggagcactgagatccaggacacaggggacctgacataggagagaagtgaagaggcacctcaggatggcagtaaaggaggtcccagcatggcagcagggcaccacagtctgagggcaggccgggtatggtgttgtgtgcctgtgatcccagctactggggaggccgtggcaagaggatcacttcaacccaggagctcgaggctgcagtgagccatgatcatgccactgcactctagcctgggtgacagacagagaccctttctctaatatagacataaaaatattatataaaaataaatatataatatttctattatataaaaattatttctacatatttctataattatataatatacaaattatttatttatttatattatataaaaataaaatagaaaaggttagagggcaacaagtccagataggaccgtgtgactcatgaggccaatgtgggggcaatcatcgccagcatgccaactgccattgtactgttttttttgttttttggttttttttgagacagtgtctcactctgttgcccacgctggagtgcagtggtataatgatctcagctcactgcagccttgacctcctgggctcaaatgatcgtcccacctcagcctcccaagtagctgggatgacaggtgcacaccaccacacctggctagtttttgtatttttttgtagagacggggtttcaccgtgtcacccaggctgatctcgaactcctgagctcaagcaatctgcccaccttgcactgtggcctcccaaagtgctgagattgcagcttgagccactgcacccggcctttgttttgttttttaagttgaggagagtatggctgggtgaacatgaaccacattcttcctttctttttaaccagagacagggtctcactacatcacccaagctgctcttgaactcctgggctcaagagatcctcccacctcagcctcccaaagtgctgggagccaccacacccggctcacattcctgtctatacttgacttgccttgaccatggcagagagcctgttctccctgcgagacctgccatggaccatggcagagagcctgttctccctgagtgacctgccatggacccaggggtatactcgtttccctctagtaactgtgctgctgggcccacgcctgagagcctgtggagggctggggtgttcctggaggtaggatacacagagctgaccacactcctgctgaccatgcacagcgtgacccacgcttcagccctgacagatcccccagttggtggtgagtcatgtgccctctaggactcaactcctgttctcacccactgaactcacgaggaaggattagtgtagaccctcagggaagatcacaccagatttgatcttgatatgacccagctcatccttcacacagcaggggccaggctgccctttcctcacacagaaggatgagccttgctctccagtgggtttttatttatttatttacagacaggatctaccaaggctggagtgcagtggtgagatcttggctcactgcaacctctgcctccctcccaggctcaagtgatcctcccatctcagctttctgaatagctgggaccacgggcacacaccaccacacctggctaatttttgtattttttgtagagacgaggtttagccatgttggccaggctggtctcaaactcctgggctcaagcgatcggcccgcctcggcctcccaaagtgctgggattacaggcgtgagccactgcgtccagcctaataagatattttttaaggcaattttttgggggggacagggtcttgctccgttgcccaggctggagtgcagtggcatgatcacagctcactgcagtctcctgggatcaagtgatcctctcacctcagcctcccgagcacacccccgtaggactttaaaatcttccaacactcctcaatgtgactacagtggaaaatggtgtacccaacaatggtacaataaatagttggggccaggcatggtggctcacacctgtaatcccagcactttgggaggccgaggtgggcagatcatttgaggtcaggagttcaagagcagcctggccaacatggtaaaaccctgtctctactaaaaaaaaaaaaaaaaaaagtccgggtgcagtggctcacgcctgtaatcccagcactttgggaggccgaggcaggtggttcacgaggtcaggagatcgagaccatcctggctaacaaggtgaaaccccgtctctactaaaaaatacaaaaaaaaattagccgggcatggtggcgggcacctgtaggcccagctacttgggaggctgaggcagcagaatggcatgaacccgggaggtggagcttgcagtgagccgtaatcgcgccactgcactccagcctgggcaacagagtgagactccgtctcaaaaaacaaaaaacaaaaattatccaggcatggtgtcatgtgcctgtattcccagctacttggaaggctgaggcaggagaatcacttgaacccaagtagcagaggttgcagtgagccaagatcacaccactgtgctccagcctaggcgacagagcaagactctgtcaaaaaaaaaaaaataataataaaataaaaataaataaatagttgggccaatatttataagagctcatgtttgtttgagggtttagtctgtccctggcctcaattccggattttatggaactgttatgtccacctgatgatacagtgatgcttggaggccacgtgcagtggctcacgcctataatcccagcacgctgggagtccaaggcaggtggatcgcttcagcccaggagtttgagaccagcctggtcagcaaggcgagactgtgtctacaaaaaatttttaaaaatcaggtgggtgaggtggtgtgaaactgtagtctcagctactagggaggttgaagtgggaagatcacttgagtccaggagttcgaggctgcagtgagctatgatcatgacactgcactgcagcctaggcaacagaatgagaccctgtcttaaaaaacaaaatacatggccaggaagggtggctaacgcctgtaatcctagcactttgagaggccaagacaggtggatcacctgaggtcgggacttcgagaccagcctgaccaacatggagaaactccgtcttgactaaaaatgcaaaattagctgggcgtggtggtgcatgcctgtaatcccagctactcaggaggctgaggcaggagaattgcttgaaccccggaggcggagattgcagtgagccaacattgcgccattgcactccagcctgggcaacaagagcaaaacttcatcttaaaaaaaaaaaaaagaaaagaaaaaaagacaaaaacaaaaccatgctgggagatgacacaggacctgaggcctgaaatccaggatgagatggcagagggatgaatcggagacagtggggcctggtggttaaggccaagtgtgcagaaaggaatgaatctcaggttttttgtttgtttgtttgtttgttttttgacacagagtcttgctctgttgcccaggctggagtgcaatggtgcaatctcagcttactgcaacttccacatcccaggttcaagagattctcttgtctcagcttcctgagtagctgggaacacaggcgtccatcactatgcctggctaatttttgtatttttagtagagacagagtttcaccatgttggccaggctggtctcgaactcctgacctcaggcgatccacccgccttggcctcccaaagtgctgggattacaggcatgagccaccgcacctggcttagctattcttcttactgacagtgtgatgtcaggtaagtgagctcactcctctgaacctcagtttcctcttctgtaatacaaaatgggaccatgtgaagtggtgaggaatccatgcaatcatacacggttcacaggaagcctccagtgaactggctgtggctgtgattatgaggtgaagtgtggggtgggctgtcctgggtccgtcacaggaagcctccacatctgagagggtgagtcactcttccttcctgctgtaatttgaagcagggtggcatctctcgggaggtgagctgtgccctgggcatgctgctcacctccggtggctcacaggtcccctgacatgtgacatcatatgcagtcaggatgaaatcatggagctcaaagtttgggatgaaaggaaatggttctgctgggaggcggagattgcagtgagccaagattgcaccattgcactccagcctgggcgacagagtaagactcggaaaaatagaaaagaaaaaggaaagaaaaaaagaaggaaagaaggagggaaggaaggaaggagagagagagagaaacgaaagaaggaaggaaggagagagagaggaaggaaggaaggagaaagaaagaaagagaaagaaagaaagaaaagagagagagagaaagaaagagagagagagaaagaaaatgattctgtgctctcctcctcctctcaatctcaaattctagggtccagcacttagccgggcagcaagaatgggttcatgatcccaacagtcattaggattcatccatgtatttgatcatttaataaatccttactgcacacctgctatgtgccagacagccaacatccctgccttcctggagctgttaggaagctggggctgatagctccaggggagatgctagaaaataaacataataaacaagtaaatattacagtctgttagaaggtgatgaatgctatgaaacaaatattagccagggtaagcttagggcaggggtcagcaaactacagtcgggtggccaaatccagcctgtcatttgtttttatacagcctacaacctaagaatggtttttactttttttttttttttaaagacgaagtctctccctgtcacccaggctggagtgcagtggtgtgatcacttctcactgcaacctctgcctcctgatttcaagtgattctcctgcctcagcctcccgagtagctgggattacaggcaaacacctccatgcccagctaatttttgtattttgagtagagacggggtttcaccatgttggccaggctggtctcaaactcctgaactcaggtgatctgcctgtcttggcctcccaaagtgctgggattataggcatgagccaccatgcttggcctagttttaacttaaaaaaacttttttttgagacaggttctcacctctgtcactcaggctggagtacagtggtgcgatcatggctcaccacagcttcaacatcccgggctcagataatcctcccacctcagcctcccaagtagctgggactacacgcgtgcaccaccacaccctgctaattttagtatttttctaagagatggggtcttgctgtattgccccagctggtctcaaacttctggacttaagtgatccttctgcctcagcttcccagagcactgggattacaggcataagcaaccatgcccggttgatttttatgttttttaatggttggaaaacaaaaacaaaagaaaaataatattttctggtgtatgaaaattatatgaattttggctgggcgtggtggctcatgcctgtaatcccagcactttgggaggctgaggcgggcggatcacctgaggtcaggagtttgaaaccagcttggccaacatggtgaaaccccatctctactaaaaatgcaaaaattagcctgatgtgatggtgggcacctgtaatcccagctactcgggaggctgaggcaggagaatcgcttgaacccgggaggcagaggttgcagtgagctgagatcgcgccattgcactccagcctgggcaacaagaaagaaactccatctcaaaaaaaaaagaaaagaaaagaaaagaaaattatatgaatttccaatttcagtgtctgtaagtttgtttgttttttggagatgaggtctcactatgttggccatgttggtcttgaactcttggcctcaagcaatcctcctgcctcgacctaccaaagtgctaggattacaggcatgagccactgcgcctggcctccataaagttttactggaatacacccacactcattgggtcctgtaatgtctgtaggtgcttttgtttgatgacagagtccagtagctgtgacggaggctacgtggcctgcaaatcttaaaatatttaatatctcgccctttaccaaaaaacttttgcagacccctggcttgtggggtggggagtagtgtgtggaggtggattgtaattttaaattagtcaaggggagggctgcctgagaaagtgtcatctgggtaaggcctgaaggaaggagagaaggggctacatgggcacctggggaagaatgttctaggtcgagggaacaggcaataagaaggccctgagaagtggggacatgactaatatgttcaaagaacagtgtagaggccaggtgcagtggctcacacctgtaatcccagcactttgggaggccggcgtgggcggatcacttgaggtcagcagttcaagaccagccttggcaacatggtgaaaccctgcctctactaaaaatacaaaaattagcccggcatggtggcatgcacctgcagtcccagttgctcgggaggctgaggcagaagaatcgcttgaacccaggaagcagaggttgcagtgagctgagattgcaccactgcactccagcctgaacaacagagcaagactccatctcaaaaaaacaaaacaaaacaaaaaacagcgtagaagcctggtgcctgaaccagtgtgggtgaggggcaagtagtaagagataaggaaagagaagtgacggggaggtcacgtggggtctcgtgggccataaggaggtctctggctttcccctgagtgagaggatcaggagggctttgagcaggtgagagacgtgatctgactcaggtgttcacaggacccctctggttacatgtgagggacagactgcagggggtgaggagggggacaggatgggagcgggaagaccagggagggacctgctgagacagcccaggaaggagaggatgggtaggggctgcagaattgggcaggttctggatagattggaaggtggagctgacagcatttcacactggataatattctaagcagggaagagtcactcctaaacgtattcacacacctgtaatcccagcagtttgggaggccaaggcgggtggatcacctgagatcaggagttcgagaccagcctggccaacatgccgaaaccccatctgtactaaaaatacaaaaaattgaccagccatggtggtgcgcacctgtaatcccagctactccataggctgaggcaggagaatcgcttgaacccgggaggcggaggttgcattgagccgagatcatgccatttcactccagcctgggcaacaagagcgaaactctgtctcaaaaaaaaaaaaaaaaaagttttcacacaccaggctttgaaatcagacacaccagggttctagtcctggcttctctgccacacaccagttgtgtgattttaggtaaactgctcaatgtctctagcctcagtttctccatctataaaatgggcttaataagcagcatgcagtatcaatgggattactcatgcagagcattcggcacacagccaagcactccatacagggaagctgcgataacggggatcattcccggggggaccccaagacctgttagccctggtccctgtccccaggtgcatgctaccgttctttctggaagggagctgtccctctaccattcaccttgtctgccccccacccagtcggtgacctgtaggtcacacgacaaggtgcttagccttgctgagcctcagtttcctcgtctgtaaaatgggtccatctgtaaaatttctaaagtctgcattaaagattgtcagggtcattaaatgaacacacagcgtgtcaatcactcgggaatcagttgctgctgtggcttcaccataaaggtcgacaacagcaactacgtggatgtccccaagcattttccccaacatcttattatgaacattttcaaatgcacaggaaaactgaaagacctttacaaggaacacacatatatccgccatatatccaactggattctatcattaacatcttactattcttggccaggcacagtgggtcacgcctgtaatttcagcactctgggaggccaaggtggaaggatcccttgagcctaggagtttgagaccagcctgggcaacatcgcaagtcttcgtctctacaaaaaatacaaaaattagccgggcgtagcagtgtgagcctgtagtcctagctactcaggaggctgaggtgggaggattgcttgagcccgagaagttgaggatgtagtgagctgagatcgcaccgctgtactccagcctggggaacagagcaagatcctgactttaaaaaaaaaaaaagaaaaagaaaaaaccaaacccaaaaagcctacatcttactattctttatatatgtacatatataactatacatatataaattagagatgggggtctcactatgttgcccaggctggtcttgaacccctaggctcacataaccctcctgcctcagcctcccaagtagctaagactgcaggtatgtaccaccgcacccagctaaaaccttgaaatatttctattaagatttttaaggactcggtt
